United States Patent Application Publication US 2026/0347803 A1, published November 5, 2026 (application 19/124,213).

The application's sequence listing, which the Patent Office published only in electronic form, follows.

SEQUENCE LISTING (1538 sequences)

SEQ ID NO: 1 - protein, 370 aa, Homo sapiens
MDAPRQVVNFGPGPAKLPHSVLLEIQKELLDYKGVGISVLEMSHRSSDFAKIINNTENLVRELLAVPDNYKVIFLQGGGCGQFSAVPLNLIGLKAGRCADYVVTGAWSAKAAEEAKKFGTINIVHPKLGSYTKIPDPSTWNLNPDASYVYYCANETVHGVEFDFIPDVKGAVLVCDMSSNFLSKPVDVSKFGVIFAGAQKNVGSAGVTVVIVRDDLLGFALRECPSVLEYKVQAGNSSLYNTPPCFSIYVMGLVLEWIKNNGGAAAMEKLSSIKSQTIYEIIDNSQGFYVCPVEPQNRSKMNIPFRIGNAKGDDALEKRFLDKALELNMLSLKGHRSVGGIRASLYNAVTIEDVQKLAAFMKKFLEMHQL

SEQ ID NO: 2 - protein, 370 aa, synthetic construct
MXXXXQXXNFGXGPXKXPHSVXLXIXKEXLXYKGVGXSVLEXSHRXSXXAKIXNXXENLVREXLAVPXNYXXXXLQGGGXGQFSXVPLNLIGXXXGXCADYVVTGXWSXXAAEEAXXFGTXNIVXPKLGSYXXIPXPXTWNLNXDXSXVYYCANETXHGVEFDFIPDVXGAVLXCDMSSXFLSKPVDVSKFGXIFAGXQKNVXSAGVTVVIVRDDLLGXAXRECPXVLXYXVQAGXSSXXNXXPXFSIXXMGXVXEWIXNNGGAAAMEKLSSIKSQTIYEIIDXSQGFYVCPVEPQNRSXMXIPFRIGNXXGDDALEXRFLDKAXELNMLSLKXHXSVGGXRAXLYNAXXXEXXQXXAXFMKKFLEMHXL

SEQ ID NO: 3 - protein, 370 aa, synthetic construct
MXXXXXXXXXXXXXXXXXXXXXXXXXXXXXXXXXXXXXXXEXXXXXXXXXXXXXXXXXXXXXXXXXXXXXXXXXXXXXXXXXXXXXXXXXXXXXXXXXXXXXXXXXXXXXXXXXXXKXXXXXXXXXXXXXYXXXXXXXXXXXXPXXXXXXXXXXXXXXXXXXXXXXXXXXXXXXXXXXXXXXXXXXXXXXXGXXXXXXXXXXXXXXXXXXXXXXXXXXXXXXXXXSXXXXXXXXXXXXXXXXXXXXXXXXXXXXXXXXXXXXXXXXXXXXXXXXXXXXXXXXXXXXXXXXXXXXXXXXXXXXXXXXXXXXXXXXXXXXXXXXXXXXXXXXXXXXXXXXXXXXXXXXXXXXXXXXXXXXXXXXXXXXXXXX

SEQ ID NO: 4 - protein, 370 aa, synthetic construct
MDAPRQVVNFGPGPAKLPHSVLLEIQKELLDYKGVGISVLEMSHRSSDFAKIINNTENLVRELLAVPDNYKVIFLQGGGCGQFSAVPLNLIGLKAGRCADYVVTGAWSAKAAEEAKKFGTINIVHPKLGSYTKIPDPSTWNLNPDASYVYYCANETVHGVEFDFIPDVKGAVLVCDMSSNFLSKPVDVSKFGVIFAGAQKNVGSAGVTVVIVRDDLLGFALRECPSVLEYKVQAGNSSLYNTPPRFSIYVMGLVLEWIKNNGGAAAMEKLSSIKSQTIYEIIDNSQGFYVCPVEPQNRSKMNIPFRIGNAKGDDALEKRFLDKALELNMLSLKGHRSVGGIRASLYNAVTIEDVQKLAAFMKKFLEMHQL

SEQ ID NO: 5 - protein, 370 aa, synthetic construct
MDAPRQVVNFGPGPAKLPHSVLLEIQKELLDYKGVGISVLEMSHRSSDFAKIINNTENLVRELLAVPDNYKVIFLQGGGCGQFSAVPLNLIGLKAGRCADYVVTGAWSAKAAEEAKKFGTINIVHPKLGSYTKIPDPSTWNLNPDASYVYYCANETVHGVEFDFIPDVKGAVLVCDMSSNFLSKPVDVSKFGVIFAGAQKNVGSAGVTVVIVRDDLLGFALRECPSVLEYKVQAGNSSLYNMPPCFSIYVMGLVLEWIKNNGGAAAMEKLSSIKSQTIYEIIDNSQGFYVCPVEPQNRSKMNIPFRIGNAKGDDALEKRFLDKALELNMLSLKGHRSVGGIRASLYNAVTIEDVQKLAAFMKKFLEMHQL

SEQ ID NO: 6 - protein, 370 aa, synthetic construct
MDAPRQVVNFGPGPAKLPHSVLLEIQKELLDYKGVGISVLEMSHRSSDFAKIINNTENLVRELLAVPDNYKVIFLQGGGCGQFSAVPLNLIGLKAGRCADYVVTGAWSAKAAEEAKKFGTINIVHPKLGSYTKIPDPSTWNLNPDASYVYYCANETVHGVEFDFIPDVKGAVLVCDMSSNFLSKPVDVSKFGVIFAGAQKNVGSARVTVVIVRDDLLGFALRECPSVLEYKVQAGNSSLYNTPPCFSIYVMGLVLEWIKNNGGAAAMEKLSSIKSQTIYEIIDNSQGFYVCPVEPQNRSKMNIPFRIGNAKGDDALEKRFLDKALELNMLSLKGHRSVGGIRASLYNAVTIEDVQKLAAFMKKFLEMHQL

SEQ ID NO: 7 - protein, 370 aa, synthetic construct
MDAPRQVVNFGPGPAKLPHSVLLEIQKELLDYKGVGISVLEMSHRSSDFAKIINNTENLVRELLAVPDNYKVIFLQGGGCGQFSAVPLYLIGLKAGRCADYVVTGAWSAKAAEEAKKFGTINIVHPKLGSYTKIPDPSTWNLNPDASYVYYCANETVHGVEFDFIPDVKGAVLVCDMSSNFLSKPVDVSKFGVIFAGAQKNVGSAGVTVVIVRDDLLGFALRECPSVLEYKVQAGNSSLYNTPPCFSIYVMGLVLEWIKNNGGAAAMEKLSSIKSQTIYEIIDNSQGFYVCPVEPQNRSKMNIPFRIGNAKGDDALEKRFLDKALELNMLSLKGHRSVGGIRASLYNAVTIEDVQKLAAFMKKFLEMHQL

SEQ ID NO: 8 - protein, 370 aa, synthetic construct
MDAPRQVVNFGPGPAKLPHSVLLEIQKELLDYKGVGISVLEMSHRSSDFAKIINNTENLVRELLAVPDNYKVIFLQGGGCGQFSAVPLNLIGLKAGRCADYVVTGAWSAKAAEEAKKFETINIVHPKLGSYTKIPDPSTWNLNPDASYVYYCANETVHGVEFDFIPDVKGAVLVCDMSSNFLSKPVDVSKFGVIFAGAQKNVGSAGVTVVIVRDDLLGFALRECPSVLEYKVQAGNSSLYNTPPCFSIYVMGLVLEWIKNNGGAAAMEKLSSIKSQTIYEIIDNSQGFYVCPVEPQNRSKMNIPFRIGNAKGDDALEKRFLDKALELNMLSLKGHRSVGGIRASLYNAVTIEDVQKLAAFMKKFLEMHQL

SEQ ID NO: 9 - protein, 370 aa, synthetic construct
MDAPRQVVNFGPRPAKLPHSVLLEIQKELLDYKGVGISVLEMSHRSSDFAKIINNTENLVRELLAVPDNYKVIFLQGGGCGQFSAVPLNLIGLKAGRCADYVVTGAWSAKAAEEAKKFGTINIVHPKLGSYTKIPDPSTWNLNPDASYVYYCANETVHGVEFDFIPDVKGAVLVCDMSSNFLSKPVDVSKFGVIFAGAQKNVGSAGVTVVIVRDDLLGFALRECPSVLEYKVQAGNSSLYNTPPCFSIYVMGLVLEWIKNNGGAAAMEKLSSIKSQTIYEIIDNSQGFYVCPVEPQNRSKMNIPFRIGNAKGDDALEKRFLDKALELNMLSLKGHRSVGGIRASLYNAVTIEDVQKLAAFMKKFLEMHQL

SEQ ID NO: 10 - protein, 370 aa, synthetic construct
MDAPRQVVNFGPGPAKLPHSVLLEIQKELLDYKGVGISVREMSHRSSDFAKIINNTENLVRELLAVPDNYKVIFLQGGGCGQFSAVPLNLIGLKAGRCADYVVTGAWSAKAAEEAKKFGTINIVHPKLGSYTKIPDPSTWNLNPDASYVYYCANETVHGVEFDFIPDVKGAVLVCDMSSNFLSKPVDVSKFGVIFAGAQKNVGSAGVTVVIVRDDLLGFALRECPSVLEYKVQAGNSSLYNTPPCFSIYVMGLVLEWIKNNGGAAAMEKLSSIKSQTIYEIIDNSQGFYVCPVEPQNRSKMNIPFRIGNAKGDDALEKRFLDKALELNMLSLKGHRSVGGIRASLYNAVTIEDVQKLAAFMKKFLEMHQL

SEQ ID NO: 11 - protein, 370 aa, synthetic construct
MDAPRQVVNFGPGPAKLPHSVLLEKQKELLDYKGVGISVLEMSHRSSDFAKIINNTENLVRELLAVPDNYKVIFLQGGGCGQFSAVPLNLIGLKAGRCADYVVTGAWSAKAAEEAKKFGTINIVHPKLGSYTKIPDPSTWNLNPDASYVYYCANETVHGVEFDFIPDVKGAVLVCDMSSNFLSKPVDVSKFGVIFAGAQKNVGSAGVTVVIVRDDLLGFALRECPSVLEYKVQAGNSSLYNTPPCFSIYVMGLVLEWIKNNGGAAAMEKLSSIKSQTIYEIIDNSQGFYVCPVEPQNRSKMNIPFRIGNAKGDDALEKRFLDKALELNMLSLKGHRSVGGIRASLYNAVTIEDVQKLAAFMKKFLEMHQL

SEQ ID NO: 12 - protein, 370 aa, synthetic construct
MDAPRQVVNFGPGPAKLPHSVLLEIQKELLDYKGVGISVLEMSHRSSDFAKIINNTENLVRELLAVPDNYKVIFLQGVGCGQFSAVPLNLIGLKAGRCADYVVTGAWSAKAAEEAKKFGTINIVHPKLGSYTKIPDPSTWNLNPDASYVYYCANETVHGVEFDFIPDVKGAVLVCDMSSNFLSKPVDVSKFGVIFAGAQKNVGSAGVTVVIVRDDLLGFALRECPSVLEYKVQAGNSSLYNTPPCFSIYVMGLVLEWIKNNGGAAAMEKLSSIKSQTIYEIIDNSQGFYVCPVEPQNRSKMNIPFRIGNAKGDDALEKRFLDKALELNMLSLKGHRSVGGIRASLYNAVTIEDVQKLAAFMKKFLEMHQL

SEQ ID NO: 13 - protein, 370 aa, synthetic construct
MDAPRQVVNFGPGPAKLPHSVLLEIQKELLDYKGVGISVLEMSHRSSDFAKIINNTENLVRESLAVPDNYKVIFLQGGGCGQFSAVPLNLIGLKAGRCADYVVTGAWSAKAAEEAKKFGTINIVHPKLGSYTKIPDPSTWNLNPDASYVYYCANETVHGVEFDFIPDVKGAVLVCDMSSNFLSKPVDVSKFGVIFAGAQKNVGSAGVTVVIVRDDLLGFALRECPSVLEYKVQAGNSSLYNTPPCFSIYVMGLVLEWIKNNGGAAAMEKLSSIKSQTIYEIIDNSQGFYVCPVEPQNRSKMNIPFRIGNAKGDDALEKRFLDKALELNMLSLKGHRSVGGIRASLYNAVTIEDVQKLAAFMKKFLEMHQL

SEQ ID NO: 14 - protein, 370 aa, synthetic construct
MDAPRQVVNFGPGPAKLPHSVLLEIQKELLDYKGVGISVLEMSHRSSDFAKIINNTENLVRELLAVPDNYKVIFLQGDGCGQFSAVPLNLIGLKAGRCADYVVTGAWSAKAAEEAKKFGTINIVHPKLGSYTKIPDPSTWNLNPDASYVYYCANETVHGVEFDFIPDVKGAVLVCDMSSNFLSKPVDVSKFGVIFAGAQKNVGSAGVTVVIVRDDLLGFALRECPSVLEYKVQAGNSSLYNTPPCFSIYVMGLVLEWIKNNGGAAAMEKLSSIKSQTIYEIIDNSQGFYVCPVEPQNRSKMNIPFRIGNAKGDDALEKRFLDKALELNMLSLKGHRSVGGIRASLYNAVTIEDVQKLAAFMKKFLEMHQL

SEQ ID NO: 15 - protein, 370 aa, synthetic construct
MDAPRQVVNFGPGPAKLPHSVLLEIQKELLDYKGVGISVLEMSHRSSDFAKIINNTENLVRELLAVPDNYKVIFLQGGGCGQFSAVPLNLIGLKAGRCADYVVTGAWSAKAAEEAKKFGTINIVHPKLGSYTKIPDPSTWNLNPDASNVYYCANETVHGVEFDFIPDVKGAVLVCDMSSNFLSKPVDVSKFGVIFAGAQKNVGSAGVTVVIVRDDLLGFALRECPSVLEYKVQAGNSSLYNTPPCFSIYVMGLVLEWIKNNGGAAAMEKLSSIKSQTIYEIIDNSQGFYVCPVEPQNRSKMNIPFRIGNAKGDDALEKRFLDKALELNMLSLKGHRSVGGIRASLYNAVTIEDVQKLAAFMKKFLEMHQL

SEQ ID NO: 16 - protein, 370 aa, synthetic construct
MDAPRQVVNFGPGPAKLPHSVLLEIQKELLDYKGVGISVLEMSHRSSDFAKIINNTENLVRELLAVPDNYKVIFLQGGRCGQFSAVPLNLIGLKAGRCADYVVTGAWSAKAAEEAKKFGTINIVHPKLGSYTKIPDPSTWNLNPDASYVYYCANETVHGVEFDFIPDVKGAVLVCDMSSNFLSKPVDVSKFGVIFAGAQKNVGSAGVTVVIVRDDLLGFALRECPSVLEYKVQAGNSSLYNTPPCFSIYVMGLVLEWIKNNGGAAAMEKLSSIKSQTIYEIIDNSQGFYVCPVEPQNRSKMNIPFRIGNAKGDDALEKRFLDKALELNMLSLKGHRSVGGIRASLYNAVTIEDVQKLAAFMKKFLEMHQL

SEQ ID NO: 17 - protein, 370 aa, synthetic construct
MDAPRQVVNFGPGPAKLPHSVLLEIQKELLDYKGVGISVLEMSHRSSDFAKIINNTENLVRELLAVPDNYKVIFLQGGGCGQFSAVPLNLIGLKAGRCADYVVTGAWSAKAAEEAKKFGTINIVHPKLGSYTKIPDPSTWNLNPDAYYVYYCANETVHGVEFDFIPDVKGAVLVCDMSSNFLSKPVDVSKFGVIFAGAQKNVGSAGVTVVIVRDDLLGFALRECPSVLEYKVQAGNSSLYNTPPCFSIYVMGLVLEWIKNNGGAAAMEKLSSIKSQTIYEIIDNSQGFYVCPVEPQNRSKMNIPFRIGNAKGDDALEKRFLDKALELNMLSLKGHRSVGGIRASLYNAVTIEDVQKLAAFMKKFLEMHQL

SEQ ID NO: 18 - protein, 370 aa, synthetic construct
MDAPRQVVNFGPGPAKLPHSVLLERQKELLDYKGVGISVLEMSHRSSDFAKIINNTENLVRELLAVPDNYKVIFLQGGGCGQFSAVPLNLIGLKAGRCADYVVTGAWSAKAAEEAKKFGTINIVHPKLGSYTKIPDPSTWNLNPDASYVYYCANETVHGVEFDFIPDVKGAVLVCDMSSNFLSKPVDVSKFGVIFAGAQKNVGSAGVTVVIVRDDLLGFALRECPSVLEYKVQAGNSSLYNTPPCFSIYVMGLVLEWIKNNGGAAAMEKLSSIKSQTIYEIIDNSQGFYVCPVEPQNRSKMNIPFRIGNAKGDDALEKRFLDKALELNMLSLKGHRSVGGIRASLYNAVTIEDVQKLAAFMKKFLEMHQL

SEQ ID NO: 19 - protein, 370 aa, synthetic construct
MDAPRQVVNFGLGPAKLPHSVLLEIQKELLDYKGVGISVLEMSHRSSDFAKIINNTENLVRELLAVPDNYKVIFLQGGGCGQFSAVPLNLIGLKAGRCADYVVTGAWSAKAAEEAKKFGTINIVHPKLGSYTKIPDPSTWNLNPDASYVYYCANETVHGVEFDFIPDVKGAVLVCDMSSNFLSKPVDVSKFGVIFAGAQKNVGSAGVTVVIVRDDLLGFALRECPSVLEYKVQAGNSSLYNTPPCFSIYVMGLVLEWIKNNGGAAAMEKLSSIKSQTIYEIIDNSQGFYVCPVEPQNRSKMNIPFRIGNAKGDDALEKRFLDKALELNMLSLKGHRSVGGIRASLYNAVTIEDVQKLAAFMKKFLEMHQL

SEQ ID NO: 20 - protein, 370 aa, synthetic construct
MDAPRQVVNFGPGPAKLPHSVLLEIQKELLDYKGVGISVLEMSHRSSDFAKIINNTENLVRELLAVPDNYKVIFLQGGGCGQFSAVPLNLIGLKAGRCADYVVTGAWSAKAAEEAKKFGTINIVHPKLGSYTKIPDPSTWNLNPDASYVYYCANETVHGVEFDFIPDVKGAVLVCDMSSNFLSKPVDVSKFGVIFAGAQKNVRSAGVTVVIVRDDLLGFALRECPSVLEYKVQAGNSSLYNTPPCFSIYVMGLVLEWIKNNGGAAAMEKLSSIKSQTIYEIIDNSQGFYVCPVEPQNRSKMNIPFRIGNAKGDDALEKRFLDKALELNMLSLKGHRSVGGIRASLYNAVTIEDVQKLAAFMKKFLEMHQL

SEQ ID NO: 21 - protein, 370 aa, synthetic construct
MDAPRQVVNFGPGPAKLPHSVLLEIQKELLDYKGVGISVLEMSHRSSDFAKIINNTENLVRELLAVPDNYKVIFLQGGGCGQFSAVPLNLIGLKAGRCADYVVTGAWSAKAAEEAKKFGTKNIVHPKLGSYTKIPDPSTWNLNPDASYVYYCANETVHGVEFDFIPDVKGAVLVCDMSSNFLSKPVDVSKFGVIFAGAQKNVGSAGVTVVIVRDDLLGFALRECPSVLEYKVQAGNSSLYNTPPCFSIYVMGLVLEWIKNNGGAAAMEKLSSIKSQTIYEIIDNSQGFYVCPVEPQNRSKMNIPFRIGNAKGDDALEKRFLDKALELNMLSLKGHRSVGGIRASLYNAVTIEDVQKLAAFMKKFLEMHQL

SEQ ID NO: 22 - protein, 370 aa, synthetic construct
MDAPRQVVNFGPGPAKLPHSVLLEIQKELLDYKGVGISVLEMSHRSSDFAKIINNTENLVRELLAVPDNYKVIFLQGAGCGQFSAVPLNLIGLKAGRCADYVVTGAWSAKAAEEAKKFGTINIVHPKLGSYTKIPDPSTWNLNPDASYVYYCANETVHGVEFDFIPDVKGAVLVCDMSSNFLSKPVDVSKFGVIFAGAQKNVGSAGVTVVIVRDDLLGFALRECPSVLEYKVQAGNSSLYNTPPCFSIYVMGLVLEWIKNNGGAAAMEKLSSIKSQTIYEIIDNSQGFYVCPVEPQNRSKMNIPFRIGNAKGDDALEKRFLDKALELNMLSLKGHRSVGGIRASLYNAVTIEDVQKLAAFMKKFLEMHQL

SEQ ID NO: 23 - protein, 370 aa, synthetic construct
MDAPRQVVNFGPGPAKLPHSVLLEIQKELLDYKGVGISDLEMSHRSSDFAKIINNTENLVRELLAVPDNYKVIFLQGGGCGQFSAVPLNLIGLKAGRCADYVVTGAWSAKAAEEAKKFGTINIVHPKLGSYTKIPDPSTWNLNPDASYVYYCANETVHGVEFDFIPDVKGAVLVCDMSSNFLSKPVDVSKFGVIFAGAQKNVGSAGVTVVIVRDDLLGFALRECPSVLEYKVQAGNSSLYNTPPCFSIYVMGLVLEWIKNNGGAAAMEKLSSIKSQTIYEIIDNSQGFYVCPVEPQNRSKMNIPFRIGNAKGDDALEKRFLDKALELNMLSLKGHRSVGGIRASLYNAVTIEDVQKLAAFMKKFLEMHQL

SEQ ID NO: 24 - protein, 370 aa, synthetic construct
MDAPRQVVNFGPGPAKLPHSVLLEIQKELLDYKGVGISVLEMSYRSSDFAKIINNTENLVRELLAVPDNYKVIFLQGGGCGQFSAVPLNLIGLKAGRCADYVVTGAWSAKAAEEAKKFGTINIVHPKLGSYTKIPDPSTWNLNPDASYVYYCANETVHGVEFDFIPDVKGAVLVCDMSSNFLSKPVDVSKFGVIFAGAQKNVGSAGVTVVIVRDDLLGFALRECPSVLEYKVQAGNSSLYNTPPCFSIYVMGLVLEWIKNNGGAAAMEKLSSIKSQTIYEIIDNSQGFYVCPVEPQNRSKMNIPFRIGNAKGDDALEKRFLDKALELNMLSLKGHRSVGGIRASLYNAVTIEDVQKLAAFMKKFLEMHQL

SEQ ID NO: 25 - protein, 370 aa, synthetic construct
MDAPRQVVNFGPGPAKLPHSVLLEIQKELLDYKGVGISVLEMSHRSSDFAKIINNTENLVRELLAVPDNYKVIFLQGGGCGQFSAVPLNLIGLKAGRCADYVVTGAWSAKAAEEAKKFGTINIVHPKLGSYTKIPDPSTWNLNPDASYVYYFANETVHGVEFDFIPDVKGAVLVCDMSSNFLSKPVDVSKFGVIFAGAQKNVGSAGVTVVIVRDDLLGFALRECPSVLEYKVQAGNSSLYNTPPCFSIYVMGLVLEWIKNNGGAAAMEKLSSIKSQTIYEIIDNSQGFYVCPVEPQNRSKMNIPFRIGNAKGDDALEKRFLDKALELNMLSLKGHRSVGGIRASLYNAVTIEDVQKLAAFMKKFLEMHQL

SEQ ID NO: 26 - protein, 370 aa, synthetic construct
MDAPRQVVNFGPGPAKLPHSVLLEIQKELLDYKGVGISVLEMSHRSSDFAKIINNTENLVRELLAVPDNYKVIFLQGGGCGQFSAVPLNLIGLKAGRCADYVVTGAWSAKAAEEAKKFGTINIVHPKLGSYTKIPDPSTWNLNPDASYVYYCANEMVHGVEFDFIPDVKGAVLVCDMSSNFLSKPVDVSKFGVIFAGAQKNVGSAGVTVVIVRDDLLGFALRECPSVLEYKVQAGNSSLYNTPPCFSIYVMGLVLEWIKNNGGAAAMEKLSSIKSQTIYEIIDNSQGFYVCPVEPQNRSKMNIPFRIGNAKGDDALEKRFLDKALELNMLSLKGHRSVGGIRASLYNAVTIEDVQKLAAFMKKFLEMHQL

SEQ ID NO: 27 - protein, 370 aa, synthetic construct
MDAPRQVVNFGPGPAKLPHSVLLEIQKELLDYKGVGISVLEMSHRSSDFAKIINNTENLVRELLAVPDNYKVIFLQGGGCGQFSAVPLNLIGLKAGRCADYVVTGAWSAKAAEEAKKFGTINIVHPKLGSYTKIPDPSTWNLNPDASYVYYCANETVHGVEFDFIPDVKGAVLVCDMSLNFLSKPVDVSKFGVIFAGAQKNVGSAGVTVVIVRDDLLGFALRECPSVLEYKVQAGNSSLYNTPPCFSIYVMGLVLEWIKNNGGAAAMEKLSSIKSQTIYEIIDNSQGFYVCPVEPQNRSKMNIPFRIGNAKGDDALEKRFLDKALELNMLSLKGHRSVGGIRASLYNAVTIEDVQKLAAFMKKFLEMHQL

SEQ ID NO: 28 - protein, 370 aa, synthetic construct
MDAPRQVVNFGPGPAKLPHSVLLEIQKELLDYKGVGISVLEMSHRSSDFAKIINNTENLVRELLAVPDNYKVIFLQGGGCGQFSAVPLNLIGLKAGRCADYVVTGAWSAKAAEEAKKFGTINIVHPKLGSYTKIPDPSTWNLNPDASYVYYCANQTVHGVEFDFIPDVKGAVLVCDMSSNFLSKPVDVSKFGVIFAGAQKNVGSAGVTVVIVRDDLLGFALRECPSVLEYKVQAGNSSLYNTPPCFSIYVMGLVLEWIKNNGGAAAMEKLSSIKSQTIYEIIDNSQGFYVCPVEPQNRSKMNIPFRIGNAKGDDALEKRFLDKALELNMLSLKGHRSVGGIRASLYNAVTIEDVQKLAAFMKKFLEMHQL

SEQ ID NO: 29 - protein, 370 aa, synthetic construct
MDAPRQVVNFGPGPAKLPHSVLLEIQKELLDYKGVGISVLEMSHRSSDFAKIINNTENLVRELLAVPDNYKVIFLQGGGCGQFRAVPLNLIGLKAGRCADYVVTGAWSAKAAEEAKKFGTINIVHPKLGSYTKIPDPSTWNLNPDASYVYYCANETVHGVEFDFIPDVKGAVLVCDMSSNFLSKPVDVSKFGVIFAGAQKNVGSAGVTVVIVRDDLLGFALRECPSVLEYKVQAGNSSLYNTPPCFSIYVMGLVLEWIKNNGGAAAMEKLSSIKSQTIYEIIDNSQGFYVCPVEPQNRSKMNIPFRIGNAKGDDALEKRFLDKALELNMLSLKGHRSVGGIRASLYNAVTIEDVQKLAAFMKKFLEMHQL

SEQ ID NO: 30 - protein, 370 aa, synthetic construct
MDAPRQVVNFRPGPAKLPHSVLLEIQKELLDYKGVGISVLEMSHRSSDFAKIINNTENLVRELLAVPDNYKVIFLQGGGCGQFSAVPLNLIGLKAGRCADYVVTGAWSAKAAEEAKKFGTINIVHPKLGSYTKIPDPSTWNLNPDASYVYYCANETVHGVEFDFIPDVKGAVLVCDMSSNFLSKPVDVSKFGVIFAGAQKNVGSAGVTVVIVRDDLLGFALRECPSVLEYKVQAGNSSLYNTPPCFSIYVMGLVLEWIKNNGGAAAMEKLSSIKSQTIYEIIDNSQGFYVCPVEPQNRSKMNIPFRIGNAKGDDALEKRFLDKALELNMLSLKGHRSVGGIRASLYNAVTIEDVQKLAAFMKKFLEMHQL

SEQ ID NO: 31 - protein, 370 aa, synthetic construct
MDAPRQVVNFGPGPAKLPHSVLLEIQKELLDYKGVGISVLEMSHRSSDFAKIINNTENLVRELLAVPDNYKVIFLQGGGCGQFSAVPLNLIGLKAGRCADYVVTGAWSAKAAEEAKKFGTINIVHPKLGSYTKIPDPSTWNLNPDASYVYYCANETVHGVEFDFIPDVKGAVLVCHMSSNFLSKPVDVSKFGVIFAGAQKNVGSAGVTVVIVRDDLLGFALRECPSVLEYKVQAGNSSLYNTPPCFSIYVMGLVLEWIKNNGGAAAMEKLSSIKSQTIYEIIDNSQGFYVCPVEPQNRSKMNIPFRIGNAKGDDALEKRFLDKALELNMLSLKGHRSVGGIRASLYNAVTIEDVQKLAAFMKKFLEMHQL

SEQ ID NO: 32 - protein, 370 aa, synthetic construct
MDAPRQVVNFGPGPAKLPHSVLLEIQKELLDYKGVGISVLEMSHRSSDFAKIINNTENLVRELLAVPDNYKVIFLQGGWCGQFSAVPLNLIGLKAGRCADYVVTGAWSAKAAEEAKKFGTINIVHPKLGSYTKIPDPSTWNLNPDASYVYYCANETVHGVEFDFIPDVKGAVLVCDMSSNFLSKPVDVSKFGVIFAGAQKNVGSAGVTVVIVRDDLLGFALRECPSVLEYKVQAGNSSLYNTPPCFSIYVMGLVLEWIKNNGGAAAMEKLSSIKSQTIYEIIDNSQGFYVCPVEPQNRSKMNIPFRIGNAKGDDALEKRFLDKALELNMLSLKGHRSVGGIRASLYNAVTIEDVQKLAAFMKKFLEMHQL

SEQ ID NO: 33 - protein, 370 aa, synthetic construct
MDAPRQVVNFGPGPAKLPHSVLLEIQKELLDYKGVGISVLEMSHRSSDFAKIINNTENLVRELLAVPDNYKVIFLQGGGCGQFSAVPLNLIGLKAGRCDDYVVTGAWSAKAAEEAKKFGTINIVHPKLGSYTKIPDPSTWNLNPDASYVYYCANETVHGVEFDFIPDVKGAVLVCDMSSNFLSKPVDVSKFGVIFAGAQKNVGSAGVTVVIVRDDLLGFALRECPSVLEYKVQAGNSSLYNTPPCFSIYVMGLVLEWIKNNGGAAAMEKLSSIKSQTIYEIIDNSQGFYVCPVEPQNRSKMNIPFRIGNAKGDDALEKRFLDKALELNMLSLKGHRSVGGIRASLYNAVTIEDVQKLAAFMKKFLEMHQL

SEQ ID NO: 34 - protein, 370 aa, synthetic construct
MDAPRQVVNFGPGPAKLPHSVLLEIQKELLDYKGVGISVLEMSHRSSDFAKIINNTENLVRELLAVPDNYKVIFLQGRGCGQFSAVPLNLIGLKAGRCADYVVTGAWSAKAAEEAKKFGTINIVHPKLGSYTKIPDPSTWNLNPDASYVYYCANETVHGVEFDFIPDVKGAVLVCDMSSNFLSKPVDVSKFGVIFAGAQKNVGSAGVTVVIVRDDLLGFALRECPSVLEYKVQAGNSSLYNTPPCFSIYVMGLVLEWIKNNGGAAAMEKLSSIKSQTIYEIIDNSQGFYVCPVEPQNRSKMNIPFRIGNAKGDDALEKRFLDKALELNMLSLKGHRSVGGIRASLYNAVTIEDVQKLAAFMKKFLEMHQL

SEQ ID NO: 35 - protein, 370 aa, synthetic construct
MDAPRQVVNFGPGPAKLPHSVLLEIQKELLDYKGVGISVLEMSHRSSDFAKIINNTENLVRELLAVPDNYKVIFLQGGGCGQFSAVPLNLIGLKAGRCADYVVTGAWSAKAAEEAKKFGTINIVHPKLGSYTKIPDPSTWNLNPDASYVYYRANETVHGVEFDFIPDVKGAVLVCDMSSNFLSKPVDVSKFGVIFAGAQKNVGSAGVTVVIVRDDLLGFALRECPSVLEYKVQAGNSSLYNTPPCFSIYVMGLVLEWIKNNGGAAAMEKLSSIKSQTIYEIIDNSQGFYVCPVEPQNRSKMNIPFRIGNAKGDDALEKRFLDKALELNMLSLKGHRSVGGIRASLYNAVTIEDVQKLAAFMKKFLEMHQL

SEQ ID NO: 36 - protein, 370 aa, synthetic construct
MDAPRQVVNFGPGPAKLPHSVLLEIQKELLDYKGVGISVLEMSHRSSDFAKIINNTENLVRELLAVPDNYKVIFLQGGGCGQFSAVPLNLIGLKAGRCADYVVTGAWSAKAAEEAKKFRTINIVHPKLGSYTKIPDPSTWNLNPDASYVYYCANETVHGVEFDFIPDVKGAVLVCDMSSNFLSKPVDVSKFGVIFAGAQKNVGSAGVTVVIVRDDLLGFALRECPSVLEYKVQAGNSSLYNTPPCFSIYVMGLVLEWIKNNGGAAAMEKLSSIKSQTIYEIIDNSQGFYVCPVEPQNRSKMNIPFRIGNAKGDDALEKRFLDKALELNMLSLKGHRSVGGIRASLYNAVTIEDVQKLAAFMKKFLEMHQL

SEQ ID NO: 37 - protein, 370 aa, synthetic construct
MDAPRQVVNFGPGPAKLPHSVLLEIQKELLDYKGVGISVLEMSHRSSDFAKIINNTENLVRELLAVPDNYKVIFLQGGGCGQFSAVPLNLIGLKAGRCADYVVTGAWSAKAAEEAKKFGTINIVHPKLGSYTKIPDPSTWNLNPDASYVYYCANETVHGVEFDFIPDVKGAVLVCAMSSNFLSKPVDVSKFGVIFAGAQKNVGSAGVTVVIVRDDLLGFALRECPSVLEYKVQAGNSSLYNTPPCFSIYVMGLVLEWIKNNGGAAAMEKLSSIKSQTIYEIIDNSQGFYVCPVEPQNRSKMNIPFRIGNAKGDDALEKRFLDKALELNMLSLKGHRSVGGIRASLYNAVTIEDVQKLAAFMKKFLEMHQL

SEQ ID NO: 38 - protein, 370 aa, synthetic construct
MDAPRQVVNFGPGPAKLPHSVLLEIQKELLDYKGVGISVLEMSHRSSDFAKIINNTENLVRELLAVPDNYKVIFLQGGGCGQFSAVPLNLIGLKAGRCADYVVTVAWSAKAAEEAKKFGTINIVHPKLGSYTKIPDPSTWNLNPDASYVYYCANETVHGVEFDFIPDVKGAVLVCDMSSNFLSKPVDVSKFGVIFAGAQKNVGSAGVTVVIVRDDLLGFALRECPSVLEYKVQAGNSSLYNTPPCFSIYVMGLVLEWIKNNGGAAAMEKLSSIKSQTIYEIIDNSQGFYVCPVEPQNRSKMNIPFRIGNAKGDDALEKRFLDKALELNMLSLKGHRSVGGIRASLYNAVTIEDVQKLAAFMKKFLEMHQL

SEQ ID NO: 39 - protein, 370 aa, synthetic construct
MDAPRQVVNFGPGPAKLPHSVLLEIQKELLDYKGVGISVLEMSHRSSDFAKIINNTENLVRELLAVPDNYKVIFLQGGGCGQFSAVPLNLIGLKAGRCADYVVTGAWSAKAAEEAKKFGTINIVHPKLGSYTKIPDPSTWNLNPDASYVYYCANETVHGVEFDFIPDVKGAVLVCDMSSNFLSKPVDVSKFGVIFAGAQNNVGSAGVTVVIVRDDLLGFALRECPSVLEYKVQAGNSSLYNTPPCFSIYVMGLVLEWIKNNGGAAAMEKLSSIKSQTIYEIIDNSQGFYVCPVEPQNRSKMNIPFRIGNAKGDDALEKRFLDKALELNMLSLKGHRSVGGIRASLYNAVTIEDVQKLAAFMKKFLEMHQL

SEQ ID NO: 40 - protein, 370 aa, synthetic construct
MDAPRQVVNFGPGPAKLPHSVLLEIQKELLDYKGVGISVLEMSHRSSDFAKIINNTENLVRELLAVPDNYKVIFLQGGGCGQFSAVPLNLIGLKAGRCADYVVTGAWSAKAAEEAKKFGTINIVHPKLGSYTKIPDPSTWNLNPDASYVYDCANETVHGVEFDFIPDVKGAVLVCDMSSNFLSKPVDVSKFGVIFAGAQKNVGSAGVTVVIVRDDLLGFALRECPSVLEYKVQAGNSSLYNTPPCFSIYVMGLVLEWIKNNGGAAAMEKLSSIKSQTIYEIIDNSQGFYVCPVEPQNRSKMNIPFRIGNAKGDDALEKRFLDKALELNMLSLKGHRSVGGIRASLYNAVTIEDVQKLAAFMKKFLEMHQL

SEQ ID NO: 41 - protein, 370 aa, synthetic construct
MDAPRQVVNFGPGPAKLPHSVLLEIQKELLDYKGVGISVLEMSHRSSDFAKIINNTENLVRELLAVPDNYKVIFLQGGGCGQFSAVPLNLIGLKAGRCADYVVTGAWSAKAAEEAKKFGTINIVHPKLGSYTKIPDPSTWNLNPDASYVYYCANETVHGVEFDFIPDVKGAVLVCYMSSNFLSKPVDVSKFGVIFAGAQKNVGSAGVTVVIVRDDLLGFALRECPSVLEYKVQAGNSSLYNTPPCFSIYVMGLVLEWIKNNGGAAAMEKLSSIKSQTIYEIIDNSQGFYVCPVEPQNRSKMNIPFRIGNAKGDDALEKRFLDKALELNMLSLKGHRSVGGIRASLYNAVTIEDVQKLAAFMKKFLEMHQL

SEQ ID NO: 42 - protein, 370 aa, synthetic construct
MDAPRQVVNFGPGPAKLPHSVLLEIQKELLDYKGVGISVLEMSHRSSDFAKIINNTENLVRELLAVPDNYKVIFLQGGGCGQFSAVPLNLIGLKAGRCADYVVTGAWPAKAAEEAKKFGTINIVHPKLGSYTKIPDPSTWNLNPDASYVYYCANETVHGVEFDFIPDVKGAVLVCDMSSNFLSKPVDVSKFGVIFAGAQKNVGSAGVTVVIVRDDLLGFALRECPSVLEYKVQAGNSSLYNTPPCFSIYVMGLVLEWIKNNGGAAAMEKLSSIKSQTIYEIIDNSQGFYVCPVEPQNRSKMNIPFRIGNAKGDDALEKRFLDKALELNMLSLKGHRSVGGIRASLYNAVTIEDVQKLAAFMKKFLEMHQL

SEQ ID NO: 43 - protein, 370 aa, synthetic construct
MDAPRQVVNFGPGPAKLPHSVLLEIQKELLDYKGVGISVLEMSHRSSDFAKIINNTENLVRELLAVPDNYKVIFLQGGGCGQFSAVPLNLIGLKAGRCADYVVTGAWSAKAAEEAKKFGTINIVHPKLGSYTKIPDPSTWNLNPDASYVYYCANETVHGVEFDFIPDVKGAVLVCDMSSNFLSKPVDVSKFGVIFADAQKNVGSAGVTVVIVRDDLLGFALRECPSVLEYKVQAGNSSLYNTPPCFSIYVMGLVLEWIKNNGGAAAMEKLSSIKSQTIYEIIDNSQGFYVCPVEPQNRSKMNIPFRIGNAKGDDALEKRFLDKALELNMLSLKGHRSVGGIRASLYNAVTIEDVQKLAAFMKKFLEMHQL

SEQ ID NO: 44 - protein, 370 aa, synthetic construct
MDAPRQVVNFGPGPAKLPHSVLLEIQKELLDYKGVGISVLEMSHRSSDFAKIINNTENLVRELLAVPDNYKVIFLQGGGCGRFSAVPLNLIGLKAGRCADYVVTGAWSAKAAEEAKKFGTINIVHPKLGSYTKIPDPSTWNLNPDASYVYYCANETVHGVEFDFIPDVKGAVLVCDMSSNFLSKPVDVSKFGVIFAGAQKNVGSAGVTVVIVRDDLLGFALRECPSVLEYKVQAGNSSLYNTPPCFSIYVMGLVLEWIKNNGGAAAMEKLSSIKSQTIYEIIDNSQGFYVCPVEPQNRSKMNIPFRIGNAKGDDALEKRFLDKALELNMLSLKGHRSVGGIRASLYNAVTIEDVQKLAAFMKKFLEMHQL

SEQ ID NO: 45 - protein, 370 aa, synthetic construct
MDAPRQVVNFGPGPAKLPHSVLLEIQKELLDYKGVGISVLEMSHSSSDFAKIINNTENLVRELLAVPDNYKVIFLQGGGCGQFSAVPLNLIGLKAGRCADYVVTGAWSAKAAEEAKKFGTINIVHPKLGSYTKIPDPSTWNLNPDASYVYYCANETVHGVEFDFIPDVKGAVLVCDMSSNFLSKPVDVSKFGVIFAGAQKNVGSAGVTVVIVRDDLLGFALRECPSVLEYKVQAGNSSLYNTPPCFSIYVMGLVLEWIKNNGGAAAMEKLSSIKSQTIYEIIDNSQGFYVCPVEPQNRSKMNIPFRIGNAKGDDALEKRFLDKALELNMLSLKGHRSVGGIRASLYNAVTIEDVQKLAAFMKKFLEMHQL

SEQ ID NO: 46 - protein, 370 aa, synthetic construct
MDAPRQVVNFGPGPAKLPHSVLLEIQKELLDYKGVGISVLEMSHRSSDFAKIINNTENLVRELLAVPDNYKVIFLQGCGCGQFSAVPLNLIGLKAGRCADYVVTGAWSAKAAEEAKKFGTINIVHPKLGSYTKIPDPSTWNLNPDASYVYYCANETVHGVEFDFIPDVKGAVLVCDMSSNFLSKPVDVSKFGVIFAGAQKNVGSAGVTVVIVRDDLLGFALRECPSVLEYKVQAGNSSLYNTPPCFSIYVMGLVLEWIKNNGGAAAMEKLSSIKSQTIYEIIDNSQGFYVCPVEPQNRSKMNIPFRIGNAKGDDALEKRFLDKALELNMLSLKGHRSVGGIRASLYNAVTIEDVQKLAAFMKKFLEMHQL

SEQ ID NO: 47 - protein, 370 aa, synthetic construct
MDAPRQVVNFGPGPAKLPHSVLLEIQKELLDYKGVGISVLEMSHRSSDFAKIINNTENLVRELLAVPDNYKVIFLQGGGCGQFSAVPLNLIGLKAGRCADYVVTGAWSAKPAEEAKKFGTINIVHPKLGSYTKIPDPSTWNLNPDASYVYYCANETVHGVEFDFIPDVKGAVLVCDMSSNFLSKPVDVSKFGVIFAGAQKNVGSAGVTVVIVRDDLLGFALRECPSVLEYKVQAGNSSLYNTPPCFSIYVMGLVLEWIKNNGGAAAMEKLSSIKSQTIYEIIDNSQGFYVCPVEPQNRSKMNIPFRIGNAKGDDALEKRFLDKALELNMLSLKGHRSVGGIRASLYNAVTIEDVQKLAAFMKKFLEMHQL

SEQ ID NO: 48 - protein, 370 aa, synthetic construct
MDAPRQVVNFGPGPAKLPHSVLLEIQKELLDYKGVGISVLEMSHRSSDFAKIINNTENLVRELLAVPDNYKVIFLQGGGCGQFSADPLNLIGLKAGRCADYVVTGAWSAKAAEEAKKFGTINIVHPKLGSYTKIPDPSTWNLNPDASYVYYCANETVHGVEFDFIPDVKGAVLVCDMSSNFLSKPVDVSKFGVIFAGAQKNVGSAGVTVVIVRDDLLGFALRECPSVLEYKVQAGNSSLYNTPPCFSIYVMGLVLEWIKNNGGAAAMEKLSSIKSQTIYEIIDNSQGFYVCPVEPQNRSKMNIPFRIGNAKGDDALEKRFLDKALELNMLSLKGHRSVGGIRASLYNAVTIEDVQKLAAFMKKFLEMHQL

SEQ ID NO: 49 - protein, 370 aa, synthetic construct
MDAPRQVVNFGPGPAKLPHSVLLEIQKELLDYKGVGISVLEMSHRSSDFAKIINNTENLVRELLAVPDNYKVIFLQGGGCGQFSAVPLNLIGLKAGRCADYVVTGAWSAKAAEEAKKFGTINIVHPKLGSYTKIPDPSTWNLNPDASYVYYCAYETVHGVEFDFIPDVKGAVLVCDMSSNFLSKPVDVSKFGVIFAGAQKNVGSAGVTVVIVRDDLLGFALRECPSVLEYKVQAGNSSLYNTPPCFSIYVMGLVLEWIKNNGGAAAMEKLSSIKSQTIYEIIDNSQGFYVCPVEPQNRSKMNIPFRIGNAKGDDALEKRFLDKALELNMLSLKGHRSVGGIRASLYNAVTIEDVQKLAAFMKKFLEMHQL

SEQ ID NO: 50 - protein, 370 aa, synthetic construct
MDAPRQVVNFGPSPAKLPHSVLLEIQKELLDYKGVGISVLEMSHRSSDFAKIINNTENLVRELLAVPDNYKVIFLQGGGCGQFSAVPLNLIGLKAGRCADYVVTGAWSAKAAEEAKKFGTINIVHPKLGSYTKIPDPSTWNLNPDASYVYYCANETVHGVEFDFIPDVKGAVLVCDMSSNFLSKPVDVSKFGVIFAGAQKNVGSAGVTVVIVRDDLLGFALRECPSVLEYKVQAGNSSLYNTPPCFSIYVMGLVLEWIKNNGGAAAMEKLSSIKSQTIYEIIDNSQGFYVCPVEPQNRSKMNIPFRIGNAKGDDALEKRFLDKALELNMLSLKGHRSVGGIRASLYNAVTIEDVQKLAAFMKKFLEMHQL

SEQ ID NO: 51 - protein, 370 aa, synthetic construct
MDAPRQVVNFGPGPAKLPHSVLLEIQKELLDYKGVGISVLEMSHRSSDFAKIINNTENLVRELLAVPDNYKVIFLQGGGCGQFSAVPLNLIGLKAGRCADYVVTGAWSAKAAEEAKKFGTINIVHPKLGSYTKIPDPSTWNLNPDASYVYYCANETVHGVEFDFIPDVKGAVLVCDMSSNFLSKPVDVSKFGVIFAGAPKNVGSAGVTVVIVRDDLLGFALRECPSVLEYKVQAGNSSLYNTPPCFSIYVMGLVLEWIKNNGGAAAMEKLSSIKSQTIYEIIDNSQGFYVCPVEPQNRSKMNIPFRIGNAKGDDALEKRFLDKALELNMLSLKGHRSVGGIRASLYNAVTIEDVQKLAAFMKKFLEMHQL

SEQ ID NO: 52 - protein, 370 aa, synthetic construct
MDAPRQVVNFGPGPAKLPHSVLLEIQKELLDYKGVGISVLEMSHRSSDFAKIINNTENLVRELLAVPDNYKVIFLQGGGCGQFSAVPLNLIGLKAGRCADYVVTGAWSAKAAEEAKKFGTINIVHPKLGSYTKIPDPSTWNLNPDASHVYYCANETVHGVEFDFIPDVKGAVLVCDMSSNFLSKPVDVSKFGVIFAGAQKNVGSAGVTVVIVRDDLLGFALRECPSVLEYKVQAGNSSLYNTPPCFSIYVMGLVLEWIKNNGGAAAMEKLSSIKSQTIYEIIDNSQGFYVCPVEPQNRSKMNIPFRIGNAKGDDALEKRFLDKALELNMLSLKGHRSVGGIRASLYNAVTIEDVQKLAAFMKKFLEMHQL

SEQ ID NO: 53 - protein, 370 aa, synthetic construct
MDAPRQVVNFGPGPAKLPHSVLLEIQKELLDYKGVGISVLEMSHRSSDFAKIINNTENLVRELLAVPDNYKVIFLQGGGCGQFSAVPLNLIGLKAGRCADYVVTGAWSAKAAEEAKKFGTINIVHPKLGSYTKIPDPSTWNLNPDASYVYYCANETVHGVEFDFIPDVKGAVLVCDMSSNFLSKPVDVSKFGVIFAGAQKNVGSAGVTVVIVRDDLLGFALRECPSVLEYKVQAGNSSLYNTPPCFSIYVMGLVLEWIKNNGGAAAMEKLSSIKSQTIYEIIDNSQGFYVCPVEPQNRSKMNIPFRIGNAKGDDALEKRFLDKALELNMLSLKGHRSVGGIQASLYNAVTIEDVQKLAAFMKKFLEMHQL

SEQ ID NO: 54 - protein, 370 aa, synthetic construct
MDAPRQVVNFGPGPAKLPHSVLLEIQKELLDYKGVGISVLEMSHRSSDFAKIINNTENLVRELLAVPDNYKVIFLQGGGCGQFSAVPLNLIGLKAGRCADYVVTGAWSAKAAEEAKKFGTINIVHPKLGSYTKIPDPSTWNLNPDASYVYYCANETVHRVEFDFIPDVKGAVLVCDMSSNFLSKPVDVSKFGVIFAGAQKNVGSAGVTVVIVRDDLLGFALRECPSVLEYKVQAGNSSLYNTPPCFSIYVMGLVLEWIKNNGGAAAMEKLSSIKSQTIYEIIDNSQGFYVCPVEPQNRSKMNIPFRIGNAKGDDALEKRFLDKALELNMLSLKGHRSVGGIRASLYNAVTIEDVQKLAAFMKKFLEMHQL

SEQ ID NO: 55 - protein, 370 aa, synthetic construct
MDAPRQVVNFGPGPAKLPHSVLLEIQKELLDYKGVGISVLEMSHRSSDFAKIINNTENLVRELLAVPDNYKVIFLQGGGCGQFSAVPLNLIGLKAGRCADYVVTGAWSAKAAEEAKKFGTINIVHPKLGSYTKIPDPSTWNLNPDASYVYYCANETVHGVEFDFIPDVKGAVLVCDMSSNFLSKPVDVSKFGVIFAGAQQNVGSAGVTVVIVRDDLLGFALRECPSVLEYKVQAGNSSLYNTPPCFSIYVMGLVLEWIKNNGGAAAMEKLSSIKSQTIYEIIDNSQGFYVCPVEPQNRSKMNIPFRIGNAKGDDALEKRFLDKALELNMLSLKGHRSVGGIRASLYNAVTIEDVQKLAAFMKKFLEMHQL

SEQ ID NO: 56 - protein, 370 aa, synthetic construct
MDAPRQVVNFGPGPAKLPHSVLLEIQKELLDYKGVGISVLEMSHRSSDFAKIINNTENLVRELLAVPDNYKVIFLQGGGCGQFSAVPLNLIGLKAGRCADYVVTGAWSAKAAEEAKKFGTINIVHPKLGSYTKIPDPSTWNLNPDASDVYYCANETVHGVEFDFIPDVKGAVLVCDMSSNFLSKPVDVSKFGVIFAGAQKNVGSAGVTVVIVRDDLLGFALRECPSVLEYKVQAGNSSLYNTPPCFSIYVMGLVLEWIKNNGGAAAMEKLSSIKSQTIYEIIDNSQGFYVCPVEPQNRSKMNIPFRIGNAKGDDALEKRFLDKALELNMLSLKGHRSVGGIRASLYNAVTIEDVQKLAAFMKKFLEMHQL

SEQ ID NO: 57 - protein, 370 aa, synthetic construct
MDAPRQVVNFGPGPAKLPHSVLLEIQKELLDYKGVGISVLEMSHRSSDFAKIINNTENLVRELLAVPDNYKVIFLQGGGCGQFSAVPLNLIGLKAGRCADYVVTGAWSAKAAEEAKKFGTINIVHPKLGSYTKIPDPSTWNLNPDASYVYYCANETVHGVEFDFIPDVKGAVLVCDMSSNFLSKPVDVSKFGVIFAGAQTNVGSAGVTVVIVRDDLLGFALRECPSVLEYKVQAGNSSLYNTPPCFSIYVMGLVLEWIKNNGGAAAMEKLSSIKSQTIYEIIDNSQGFYVCPVEPQNRSKMNIPFRIGNAKGDDALEKRFLDKALELNMLSLKGHRSVGGIRASLYNAVTIEDVQKLAAFMKKFLEMHQL

SEQ ID NO: 58 - protein, 370 aa, synthetic construct
MDAPRQVVNFGPGPAKLPHSVLLEIQKELLDYKGVGISVLEMSHRSSDFAKIINNTENLVRELLAVPDNYKVIFLQGGGCGQFSAVPLNLIGLKAGRCADYVVTGAWSAKAAEEAKKFGTINIVHPKLGSYTKIPDPSTWNLNPDASYVYYCANVTVHGVEFDFIPDVKGAVLVCDMSSNFLSKPVDVSKFGVIFAGAQKNVGSAGVTVVIVRDDLLGFALRECPSVLEYKVQAGNSSLYNTPPCFSIYVMGLVLEWIKNNGGAAAMEKLSSIKSQTIYEIIDNSQGFYVCPVEPQNRSKMNIPFRIGNAKGDDALEKRFLDKALELNMLSLKGHRSVGGIRASLYNAVTIEDVQKLAAFMKKFLEMHQL

SEQ ID NO: 59 - protein, 370 aa, synthetic construct
MDAPRQVVNFGPGPAKLPHSVLLEIQKELLDYKGVGISVLEMSHRSSDFAKIINNTENLVRELLAVPDNYKVIFLQGGGCGQFSAVPLNLIGLKAGRCADYVVTGAWSAKAAEEDKKFGTINIVHPKLGSYTKIPDPSTWNLNPDASYVYYCANETVHGVEFDFIPDVKGAVLVCDMSSNFLSKPVDVSKFGVIFAGAQKNVGSAGVTVVIVRDDLLGFALRECPSVLEYKVQAGNSSLYNTPPCFSIYVMGLVLEWIKNNGGAAAMEKLSSIKSQTIYEIIDNSQGFYVCPVEPQNRSKMNIPFRIGNAKGDDALEKRFLDKALELNMLSLKGHRSVGGIRASLYNAVTIEDVQKLAAFMKKFLEMHQL

SEQ ID NO: 60 - protein, 370 aa, synthetic construct
MDAPRQVVNFGPGPAKLPHSVLLEIQKELLDYKGVGISVLEMSHRSSDFAKIINNTENLVRELLAVPDNYKVIFLQGGGCGQFSAVPLNLIGLKAGRCADYVVTGAWSAKAAEEAKKFGTINIVHPKLGSYTKIPDPSTWNLNPDASYVYYCANETVHGVEFDFIPDVKGAVLVCDMSSNFRSKPVDVSKFGVIFAGAQKNVGSAGVTVVIVRDDLLGFALRECPSVLEYKVQAGNSSLYNTPPCFSIYVMGLVLEWIKNNGGAAAMEKLSSIKSQTIYEIIDNSQGFYVCPVEPQNRSKMNIPFRIGNAKGDDALEKRFLDKALELNMLSLKGHRSVGGIRASLYNAVTIEDVQKLAAFMKKFLEMHQL

SEQ ID NO: 61 - protein, 370 aa, synthetic construct
MDAPRQVVNFGPGPAKLPHSVLLEIQKELLDYKGVGISVLEMSHRSSDFAKIINNTENLVRELLAVPDNYKVIFLQGGGCGQFSAVPLNLIGLKAGRCADYVVTGAWSAKDAEEAKKFGTINIVHPKLGSYTKIPDPSTWNLNPDASYVYYCANETVHGVEFDFIPDVKGAVLVCDMSSNFLSKPVDVSKFGVIFAGAQKNVGSAGVTVVIVRDDLLGFALRECPSVLEYKVQAGNSSLYNTPPCFSIYVMGLVLEWIKNNGGAAAMEKLSSIKSQTIYEIIDNSQGFYVCPVEPQNRSKMNIPFRIGNAKGDDALEKRFLDKALELNMLSLKGHRSVGGIRASLYNAVTIEDVQKLAAFMKKFLEMHQL

SEQ ID NO: 62 - protein, 370 aa, synthetic construct
MDAPRQVVNFGPGPAKLPHSVLLEIQKELLDYKGVGISVLEMSHRSSDFAKIINNTENLVRELLAVPDNYKVIFLQGGGCGQFSAVPLNLIGLKAGRCADDVVTGAWSAKAAEEAKKFGTINIVHPKLGSYTKIPDPSTWNLNPDASYVYYCANETVHGVEFDFIPDVKGAVLVCDMSSNFLSKPVDVSKFGVIFAGAQKNVGSAGVTVVIVRDDLLGFALRECPSVLEYKVQAGNSSLYNTPPCFSIYVMGLVLEWIKNNGGAAAMEKLSSIKSQTIYEIIDNSQGFYVCPVEPQNRSKMNIPFRIGNAKGDDALEKRFLDKALELNMLSLKGHRSVGGIRASLYNAVTIEDVQKLAAFMKKFLEMHQL

SEQ ID NO: 63 - protein, 370 aa, synthetic construct
MDAPRQVVNFGPGPAKLPHSVLLEIQKELLDYKGVGISVLEMSHRSSDFAKIINNTENLVRELLAVPDNYKVIFLQGGECGQFSAVPLNLIGLKAGRCADYVVTGAWSAKAAEEAKKFGTINIVHPKLGSYTKIPDPSTWNLNPDASYVYYCANETVHGVEFDFIPDVKGAVLVCDMSSNFLSKPVDVSKFGVIFAGAQKNVGSAGVTVVIVRDDLLGFALRECPSVLEYKVQAGNSSLYNTPPCFSIYVMGLVLEWIKNNGGAAAMEKLSSIKSQTIYEIIDNSQGFYVCPVEPQNRSKMNIPFRIGNAKGDDALEKRFLDKALELNMLSLKGHRSVGGIRASLYNAVTIEDVQKLAAFMKKFLEMHQL

SEQ ID NO: 64 - protein, 370 aa, synthetic construct
MDAPRQVVNFGPGPAKLPHSVLLEIQKELLDYKGVGISVLEMSHRSSDFAKIINNTENLVRELLAVPDNYKVIFLQGGGCGQFSAVPLNLIGLKAGRCADYVVTGAWSAKAAEEAKKFGTINIVHPKLGSYTKIPDPSTWNLNPDASYVYYCANETVHGVEFDFIPDVKGAVLVCDMSSNFLSKPVDVSKFGVIFAGAQRNVGSAGVTVVIVRDDLLGFALRECPSVLEYKVQAGNSSLYNTPPCFSIYVMGLVLEWIKNNGGAAAMEKLSSIKSQTIYEIIDNSQGFYVCPVEPQNRSKMNIPFRIGNAKGDDALEKRFLDKALELNMLSLKGHRSVGGIRASLYNAVTIEDVQKLAAFMKKFLEMHQL

SEQ ID NO: 65 - protein, 370 aa, synthetic construct
MDAPRQVVNFGPGPAKLPHSVLLEIQKELLDYKGVGISVLEMSHRSSDFAKIINNTENLVRELLAVPDNYKVIFLQGGGCGQFSAVPLNLIGLKAGRCADYVVTGAWSAKAAEEAKKFGTINIVHPKLGSYTKIPDPSTWNLNPDASYVYYCANETVHGVEFDFIPDVKGAVLVCDMSSNFLSKPVDVSKFGVIFARAQKNVGSAGVTVVIVRDDLLGFALRECPSVLEYKVQAGNSSLYNTPPCFSIYVMGLVLEWIKNNGGAAAMEKLSSIKSQTIYEIIDNSQGFYVCPVEPQNRSKMNIPFRIGNAKGDDALEKRFLDKALELNMLSLKGHRSVGGIRASLYNAVTIEDVQKLAAFMKKFLEMHQL

SEQ ID NO: 66 - protein, 370 aa, synthetic construct
MDAPRQVVNFGPGPAKLPHSVLLEIQKELLDYKGVGISVLEMSHRSSDFAKIINNTENLVRELLAVPDNYKVIFLQGGGCGQFSAVPLNLIGLKAGRCADYVVTGAWSAKAAEEAKKFGTINIVHPKLGSYTKIPDPSTWNLNPDASYVYYYANETVHGVEFDFIPDVKGAVLVCDMSSNFLSKPVDVSKFGVIFAGAQKNVGSAGVTVVIVRDDLLGFALRECPSVLEYKVQAGNSSLYNTPPCFSIYVMGLVLEWIKNNGGAAAMEKLSSIKSQTIYEIIDNSQGFYVCPVEPQNRSKMNIPFRIGNAKGDDALEKRFLDKALELNMLSLKGHRSVGGIRASLYNAVTIEDVQKLAAFMKKFLEMHQL

SEQ ID NO: 67 - protein, 370 aa, synthetic construct
MDAPRQVVNFGPGPAKLPHSVLLEIQKELLDYKGVGISVLEMSHRSSDFAKIINNTENLVRELLAVPDNYKVIFLQGGGCGQFSAVPLNLIGLKAGRCADYVVTGAWSAKAAEEAKKFGTINIVHPKLGSYTKIPDPSTWNLNPDASYVYYCANETVHGVEFDFIPDVKGAVLVCNMSSNFLSKPVDVSKFGVIFAGAQKNVGSAGVTVVIVRDDLLGFALRECPSVLEYKVQAGNSSLYNTPPCFSIYVMGLVLEWIKNNGGAAAMEKLSSIKSQTIYEIIDNSQGFYVCPVEPQNRSKMNIPFRIGNAKGDDALEKRFLDKALELNMLSLKGHRSVGGIRASLYNAVTIEDVQKLAAFMKKFLEMHQL

SEQ ID NO: 68 - protein, 370 aa, synthetic construct
MDAPRQVVNFGPGPAKLPHSVLLEIQKELLDYKGVGISVLEMSHRSSDFAKIINNTENLVRELLAVPDNYKVIFLQGGGCGQFSAVPLNLIGLKAGRCADYVVTGAWSAKAAEEAKKFGTINIVHPKLGSYTKIPDPSTWNLNPDASYVYYCANKTVHGVEFDFIPDVKGAVLVCDMSSNFLSKPVDVSKFGVIFAGAQKNVGSAGVTVVIVRDDLLGFALRECPSVLEYKVQAGNSSLYNTPPCFSIYVMGLVLEWIKNNGGAAAMEKLSSIKSQTIYEIIDNSQGFYVCPVEPQNRSKMNIPFRIGNAKGDDALEKRFLDKALELNMLSLKGHRSVGGIRASLYNAVTIEDVQKLAAFMKKFLEMHQL

SEQ ID NO: 69 - protein, 370 aa, synthetic construct
MDAPRQVVNFGPGPAKLPHSVLLEIQKELLDYKGVGISVLEMSHRSSDFAKIINNTENLVRELLAVPDNYKVIFLQGGGCGQFSAVPLNLIGLKAGRCADYVVTGAWSAKAAEEAKKFGTINIVHPKLGSYTKIPDPSTWNLNPDASYVYYCANETVHGVEFDFIPDVKGAVLVCDMSSNFLSKPVDVSKFGVIFAGDQKNVGSAGVTVVIVRDDLLGFALRECPSVLEYKVQAGNSSLYNTPPCFSIYVMGLVLEWIKNNGGAAAMEKLSSIKSQTIYEIIDNSQGFYVCPVEPQNRSKMNIPFRIGNAKGDDALEKRFLDKALELNMLSLKGHRSVGGIRASLYNAVTIEDVQKLAAFMKKFLEMHQL

SEQ ID NO: 70 - protein, 370 aa, synthetic construct
MDAPRQVVNFGPGPAKLPHSVLLEIQKELLDYKGVGISVLEMSHRSSDFAKIINNTENLVRELLAVPDNYKVIFLQGGGCGQFSAVPLNLIGLKAGRCADYVVTGAWSAKAAEEAKKFGTINIVHPKLGSYTKIPDPSTWNLNPDASYVYYCANETVHGVEFDFIPDVKGAVLVCDMSSNFLSKPVDVSKFGVIFAGAQMNVGSAGVTVVIVRDDLLGFALRECPSVLEYKVQAGNSSLYNTPPCFSIYVMGLVLEWIKNNGGAAAMEKLSSIKSQTIYEIIDNSQGFYVCPVEPQNRSKMNIPFRIGNAKGDDALEKRFLDKALELNMLSLKGHRSVGGIRASLYNAVTIEDVQKLAAFMKKFLEMHQL

SEQ ID NO: 71 - protein, 370 aa, synthetic construct
MDAPRQVVNFGPGPAKLPHSVLLEIQKELLDYKGVGISVLEMSHRSSDFAKIINNTENLVRELLAVPDNYKVIFLQGGGCGQFSAVPLNLIGLKAGGCADYVVTGAWSAKAAEEAKKFGTINIVHPKLGSYTKIPDPSTWNLNPDASYVYYCANETVHGVEFDFIPDVKGAVLVCDMSSNFLSKPVDVSKFGVIFAGAQKNVGSAGVTVVIVRDDLLGFALRECPSVLEYKVQAGNSSLYNTPPCFSIYVMGLVLEWIKNNGGAAAMEKLSSIKSQTIYEIIDNSQGFYVCPVEPQNRSKMNIPFRIGNAKGDDALEKRFLDKALELNMLSLKGHRSVGGIRASLYNAVTIEDVQKLAAFMKKFLEMHQL

SEQ ID NO: 72 - protein, 370 aa, synthetic construct
MDAPRQVVNFGPGPAKLPHSVLLEIQKELLDYKGVGISVLEMSHRSSDFAKIINNTENLVRELLAVPDNYKVIFLQGGGCGQFSAVPLNLIGLKAGRCADYVVTGAWSAKAAEEAKKFGTINIVHPKLGSYTKIPDPSTWNLNPDASYVYYCANETVHGVEFDFIPDVKGAVLVCDMSSNFLSKPVDDSKFGVIFAGAQKNVGSAGVTVVIVRDDLLGFALRECPSVLEYKVQAGNSSLYNTPPCFSIYVMGLVLEWIKNNGGAAAMEKLSSIKSQTIYEIIDNSQGFYVCPVEPQNRSKMNIPFRIGNAKGDDALEKRFLDKALELNMLSLKGHRSVGGIRASLYNAVTIEDVQKLAAFMKKFLEMHQL

SEQ ID NO: 73 - protein, 370 aa, synthetic construct
MDAPRQVVNFGPGTAKLPHSVLLEIQKELLDYKGVGISVLEMSHRSSDFAKIINNTENLVRELLAVPDNYKVIFLQGGGCGQFSAVPLNLIGLKAGRCADYVVTGAWSAKAAEEAKKFGTINIVHPKLGSYTKIPDPSTWNLNPDASYVYYCANETVHGVEFDFIPDVKGAVLVCDMSSNFLSKPVDVSKFGVIFAGAQKNVGSAGVTVVIVRDDLLGFALRECPSVLEYKVQAGNSSLYNTPPCFSIYVMGLVLEWIKNNGGAAAMEKLSSIKSQTIYEIIDNSQGFYVCPVEPQNRSKMNIPFRIGNAKGDDALEKRFLDKALELNMLSLKGHRSVGGIRASLYNAVTIEDVQKLAAFMKKFLEMHQL

SEQ ID NO: 74 - protein, 370 aa, synthetic construct
MDAPRQVVNFGRGPAKLPHSVLLEIQKELLDYKGVGISVLEMSHRSSDFAKIINNTENLVRELLAVPDNYKVIFLQGGGCGQFSAVPLNLIGLKAGRCADYVVTGAWSAKAAEEAKKFGTINIVHPKLGSYTKIPDPSTWNLNPDASYVYYCANETVHGVEFDFIPDVKGAVLVCDMSSNFLSKPVDVSKFGVIFAGAQKNVGSAGVTVVIVRDDLLGFALRECPSVLEYKVQAGNSSLYNTPPCFSIYVMGLVLEWIKNNGGAAAMEKLSSIKSQTIYEIIDNSQGFYVCPVEPQNRSKMNIPFRIGNAKGDDALEKRFLDKALELNMLSLKGHRSVGGIRASLYNAVTIEDVQKLAAFMKKFLEMHQL

SEQ ID NO: 75 - protein, 370 aa, synthetic construct
MDAPRQVVNFGPGPAKLPHSVLLEIQKELLDYKGVGISVLEMSHRSSDFAKIINNTENLVRELLAVPDNYKVIFLQGGGCGQFSAVPLKLIGLKAGRCADYVVTGAWSAKAAEEAKKFGTINIVHPKLGSYTKIPDPSTWNLNPDASYVYYCANETVHGVEFDFIPDVKGAVLVCDMSSNFLSKPVDVSKFGVIFAGAQKNVGSAGVTVVIVRDDLLGFALRECPSVLEYKVQAGNSSLYNTPPCFSIYVMGLVLEWIKNNGGAAAMEKLSSIKSQTIYEIIDNSQGFYVCPVEPQNRSKMNIPFRIGNAKGDDALEKRFLDKALELNMLSLKGHRSVGGIRASLYNAVTIEDVQKLAAFMKKFLEMHQL

SEQ ID NO: 76 - protein, 370 aa, synthetic construct
MDAPRQVVNFGPGPAKLPHSVLLEIQKELLDYKGVGIRVLEMSHRSSDFAKIINNTENLVRELLAVPDNYKVIFLQGGGCGQFSAVPLNLIGLKAGRCADYVVTGAWSAKAAEEAKKFGTINIVHPKLGSYTKIPDPSTWNLNPDASYVYYCANETVHGVEFDFIPDVKGAVLVCDMSSNFLSKPVDVSKFGVIFAGAQKNVGSAGVTVVIVRDDLLGFALRECPSVLEYKVQAGNSSLYNTPPCFSIYVMGLVLEWIKNNGGAAAMEKLSSIKSQTIYEIIDNSQGFYVCPVEPQNRSKMNIPFRIGNAKGDDALEKRFLDKALELNMLSLKGHRSVGGIRASLYNAVTIEDVQKLAAFMKKFLEMHQL

SEQ ID NO: 77 - protein, 370 aa, synthetic construct
MDAPRQVVNFGPGPAKLPHSVLLEIQKELLDYKGVGISVLEMSHRSSDFAKIINNTENLVRELLAVPDNYKVIFLQGGGCGQFSAVPLNLIGLKAGRCADNVVTGAWSAKAAEEAKKFGTINIVHPKLGSYTKIPDPSTWNLNPDASYVYYCANETVHGVEFDFIPDVKGAVLVCDMSSNFLSKPVDVSKFGVIFAGAQKNVGSAGVTVVIVRDDLLGFALRECPSVLEYKVQAGNSSLYNTPPCFSIYVMGLVLEWIKNNGGAAAMEKLSSIKSQTIYEIIDNSQGFYVCPVEPQNRSKMNIPFRIGNAKGDDALEKRFLDKALELNMLSLKGHRSVGGIRASLYNAVTIEDVQKLAAFMKKFLEMHQL

SEQ ID NO: 78 - protein, 370 aa, synthetic construct
MDAPRQVVNFGPGPAKLPHSVLLEIQKELLDYKGVGISVLEMSHRSSDFAKIINNTENLVRELLAVPDNYKVIFLQGGGCGQFSAVRLNLIGLKAGRCADYVVTGAWSAKAAEEAKKFGTINIVHPKLGSYTKIPDPSTWNLNPDASYVYYCANETVHGVEFDFIPDVKGAVLVCDMSSNFLSKPVDVSKFGVIFAGAQKNVGSAGVTVVIVRDDLLGFALRECPSVLEYKVQAGNSSLYNTPPCFSIYVMGLVLEWIKNNGGAAAMEKLSSIKSQTIYEIIDNSQGFYVCPVEPQNRSKMNIPFRIGNAKGDDALEKRFLDKALELNMLSLKGHRSVGGIRASLYNAVTIEDVQKLAAFMKKFLEMHQL

SEQ ID NO: 79 - protein, 370 aa, synthetic construct
MDAPRQVVNFGPCPAKLPHSVLLEIQKELLDYKGVGISVLEMSHRSSDFAKIINNTENLVRELLAVPDNYKVIFLQGGGCGQFSAVPLNLIGLKAGRCADYVVTGAWSAKAAEEAKKFGTINIVHPKLGSYTKIPDPSTWNLNPDASYVYYCANETVHGVEFDFIPDVKGAVLVCDMSSNFLSKPVDVSKFGVIFAGAQKNVGSAGVTVVIVRDDLLGFALRECPSVLEYKVQAGNSSLYNTPPCFSIYVMGLVLEWIKNNGGAAAMEKLSSIKSQTIYEIIDNSQGFYVCPVEPQNRSKMNIPFRIGNAKGDDALEKRFLDKALELNMLSLKGHRSVGGIRASLYNAVTIEDVQKLAAFMKKFLEMHQL

SEQ ID NO: 80 - protein, 370 aa, synthetic construct
MDAPRQVVNFGPGPAKLPHSVLLEIQKELLDYKGVGISVLEMSHRSSDFAKIINNTENLVRELLAVPDNYKVIFLQGGGCGQFSAVPLNLIGLKAGRCADYVVTGAWSAKAAEEAKKFGTINIVHPKLGSYTKIPDPSTWNLNPDASYVYYCANETVHGVEFDFIPDVKGAVLVCDMSSNFLSKPVDVSKFGVIFAGAQKNVGSAGVTVVIVRDDLLGFALRECPSVLEYKVQAGNSSLYNTPPCFSIYVMGLVPEWIKNNGGAAAMEKLSSIKSQTIYEIIDNSQGFYVCPVEPQNRSKMNIPFRIGNAKGDDALEKRFLDKALELNMLSLKGHRSVGGIRASLYNAVTIEDVQKLAAFMKKFLEMHQL

SEQ ID NO: 81 - protein, 370 aa, synthetic construct
MDAPRQVVNFGPGPAKLPHSVLLEIQKELLDYKGVGISVLEMSHRSSDFAKIINNTENLVRELLAVPDNYKVIFLQGGGCGQFSAVPLNLIGLKAGRCADYVVPGAWSAKAAEEAKKFGTINIVHPKLGSYTKIPDPSTWNLNPDASYVYYCANETVHGVEFDFIPDVKGAVLVCDMSSNFLSKPVDVSKFGVIFAGAQKNVGSAGVTVVIVRDDLLGFALRECPSVLEYKVQAGNSSLYNTPPCFSIYVMGLVLEWIKNNGGAAAMEKLSSIKSQTIYEIIDNSQGFYVCPVEPQNRSKMNIPFRIGNAKGDDALEKRFLDKALELNMLSLKGHRSVGGIRASLYNAVTIEDVQKLAAFMKKFLEMHQL

SEQ ID NO: 82 - protein, 370 aa, synthetic construct
MDAPRQVVNFGPGPAKLPHSVLLEIQKELLDYKGVGISVLEMSHRSSDFAKIINNTENLVRELLAVPDNYKVIFLQGGGCGQFSAVPLNLIGLKAGRCADYVVTGAWSAKAAEEAKKFGTINIVHPKLGSYTKIPDPSTWNLNPDASYVYYCADETVHGVEFDFIPDVKGAVLVCDMSSNFLSKPVDVSKFGVIFAGAQKNVGSAGVTVVIVRDDLLGFALRECPSVLEYKVQAGNSSLYNTPPCFSIYVMGLVLEWIKNNGGAAAMEKLSSIKSQTIYEIIDNSQGFYVCPVEPQNRSKMNIPFRIGNAKGDDALEKRFLDKALELNMLSLKGHRSVGGIRASLYNAVTIEDVQKLAAFMKKFLEMHQL

SEQ ID NO: 83 - protein, 370 aa, synthetic construct
MDAPRQVVNFGPGPAKLPHSVLLEIQKELLDYKGVGISVLEMSHRSSDFAKIINNTENLVRELLAVPDNYKVIFLQGGGCGQFSAVPLNLIGLKAGRCADYVVTGAWSPKAAEEAKKFGTINIVHPKLGSYTKIPDPSTWNLNPDASYVYYCANETVHGVEFDFIPDVKGAVLVCDMSSNFLSKPVDVSKFGVIFAGAQKNVGSAGVTVVIVRDDLLGFALRECPSVLEYKVQAGNSSLYNTPPCFSIYVMGLVLEWIKNNGGAAAMEKLSSIKSQTIYEIIDNSQGFYVCPVEPQNRSKMNIPFRIGNAKGDDALEKRFLDKALELNMLSLKGHRSVGGIRASLYNAVTIEDVQKLAAFMKKFLEMHQL

SEQ ID NO: 84 - protein, 370 aa, synthetic construct
MDAPRQVVNFGPGPAKLPHSVLLEIQKELLDYKGVGISVLEMSHRSSDFAKIINNTENLVRELLAVPDNYKVIFLQGGGCGQFSAVPLNPIGLKAGRCADYVVTGAWSAKAAEEAKKFGTINIVHPKLGSYTKIPDPSTWNLNPDASYVYYCANETVHGVEFDFIPDVKGAVLVCDMSSNFLSKPVDVSKFGVIFAGAQKNVGSAGVTVVIVRDDLLGFALRECPSVLEYKVQAGNSSLYNTPPCFSIYVMGLVLEWIKNNGGAAAMEKLSSIKSQTIYEIIDNSQGFYVCPVEPQNRSKMNIPFRIGNAKGDDALEKRFLDKALELNMLSLKGHRSVGGIRASLYNAVTIEDVQKLAAFMKKFLEMHQL

SEQ ID NO: 85 - protein, 370 aa, synthetic construct
MDAPRQVVNFGPGPAKLPHSVLLEIQKELLDYKGVGISVLEMSHRSSDFAKIINNTENLVRELLAVPDNYKVIFLQGGGCGPFSAVPLNLIGLKAGRCADYVVTGAWSAKAAEEAKKFGTINIVHPKLGSYTKIPDPSTWNLNPDASYVYYCANETVHGVEFDFIPDVKGAVLVCDMSSNFLSKPVDVSKFGVIFAGAQKNVGSAGVTVVIVRDDLLGFALRECPSVLEYKVQAGNSSLYNTPPCFSIYVMGLVLEWIKNNGGAAAMEKLSSIKSQTIYEIIDNSQGFYVCPVEPQNRSKMNIPFRIGNAKGDDALEKRFLDKALELNMLSLKGHRSVGGIRASLYNAVTIEDVQKLAAFMKKFLEMHQL

SEQ ID NO: 86 - protein, 370 aa, synthetic construct
MDAPRQVVNFGPGPAKLPHSVLLEIQKELLDYKGVGISVLEMSHRSSDFAKIINNTENLVRELLAVPDNYKVIFLQGGGCGQFSAVPLNLIGLKAGRCADYVVTGAWSAKAAEEAKKFGTINIVHPKLGSYTKIPDPSTWNLNPDASYVYYCANETVHGVEFDFIPDVKGAVLVCDMSSNFLSKPVDVSKFGVIFAGAQKNVGSAGVTVVIVRDDLLGFALRECPSVLEYKVQAGNSSLYNTPPCFSIYVMGLVLEWIKNNGGAAAMEKLSSIKSQTIYEIIDNSQGFYVCPVEPQNRSKMYIPFRIGNAKGDDALEKRFLDKALELNMLSLKGHRSVGGIRASLYNAVTIEDVQKLAAFMKKFLEMHQL

SEQ ID NO: 87 - protein, 370 aa, synthetic construct
MDAPRQVVNFGPGLAKLPHSVLLEIQKELLDYKGVGISVLEMSHRSSDFAKIINNTENLVRELLAVPDNYKVIFLQGGGCGQFSAVPLNLIGLKAGRCADYVVTGAWSAKAAEEAKKFGTINIVHPKLGSYTKIPDPSTWNLNPDASYVYYCANETVHGVEFDFIPDVKGAVLVCDMSSNFLSKPVDVSKFGVIFAGAQKNVGSAGVTVVIVRDDLLGFALRECPSVLEYKVQAGNSSLYNTPPCFSIYVMGLVLEWIKNNGGAAAMEKLSSIKSQTIYEIIDNSQGFYVCPVEPQNRSKMNIPFRIGNAKGDDALEKRFLDKALELNMLSLKGHRSVGGIRASLYNAVTIEDVQKLAAFMKKFLEMHQL

SEQ ID NO: 88 - protein, 370 aa, synthetic construct
MDAPRQVVNFGPGHAKLPHSVLLEIQKELLDYKGVGISVLEMSHRSSDFAKIINNTENLVRELLAVPDNYKVIFLQGGGCGQFSAVPLNLIGLKAGRCADYVVTGAWSAKAAEEAKKFGTINIVHPKLGSYTKIPDPSTWNLNPDASYVYYCANETVHGVEFDFIPDVKGAVLVCDMSSNFLSKPVDVSKFGVIFAGAQKNVGSAGVTVVIVRDDLLGFALRECPSVLEYKVQAGNSSLYNTPPCFSIYVMGLVLEWIKNNGGAAAMEKLSSIKSQTIYEIIDNSQGFYVCPVEPQNRSKMNIPFRIGNAKGDDALEKRFLDKALELNMLSLKGHRSVGGIRASLYNAVTIEDVQKLAAFMKKFLEMHQL

SEQ ID NO: 89 - protein, 370 aa, synthetic construct
MDAPRQVVNFGPGPAKLPHSVLLEIQKELLDYKGVGISVLEMSHRSSDFAKIINNTENLVRELLAVPDNYKVIFLQGGGCGQFSAVPLNLIGLKAGRCADYVVTGAWSAKAAEEAKKFGTINIVHPKLGSYTKIPDPSTWNLNPDASYVYYCANETVHGVEFDFIPDVKGAVLVCDMSSNFLSKPVDVSKFGVIFAGAKKNVGSAGVTVVIVRDDLLGFALRECPSVLEYKVQAGNSSLYNTPPCFSIYVMGLVLEWIKNNGGAAAMEKLSSIKSQTIYEIIDNSQGFYVCPVEPQNRSKMNIPFRIGNAKGDDALEKRFLDKALELNMLSLKGHRSVGGIRASLYNAVTIEDVQKLAAFMKKFLEMHQL

SEQ ID NO: 90 - protein, 370 aa, synthetic construct
MDAPRQVVNFGPGPAKLPHSVLLEIQKELLDYKGVGISVLEMSHRSSDFAKIINNTENLVRELLAVPDNYKVIFLQGGGCGQFSAVPLNLIGLKAGRCADYVVTGAWSAKAAEEAKKFGTINIVHPKLGSYTKIPDPSTWNLNPDASYVYYCANEPVHGVEFDFIPDVKGAVLVCDMSSNFLSKPVDVSKFGVIFAGAQKNVGSAGVTVVIVRDDLLGFALRECPSVLEYKVQAGNSSLYNTPPCFSIYVMGLVLEWIKNNGGAAAMEKLSSIKSQTIYEIIDNSQGFYVCPVEPQNRSKMNIPFRIGNAKGDDALEKRFLDKALELNMLSLKGHRSVGGIRASLYNAVTIEDVQKLAAFMKKFLEMHQL

SEQ ID NO: 91 - protein, 370 aa, synthetic construct
MDAPRQVVNFGPGPAKLPHSVLLEIQKELLDYKGVGISVLEMSHRSSDFAKIINNTENLVRELLAVPDNYKVIFLQGGGCGQFSAVPLNLIGLKAGRCADYVVTGAWSAKAAEEAKKFGTINIVHPKLGSYTKIPDPSTWNLNPDASYVYYCANERVHGVEFDFIPDVKGAVLVCDMSSNFLSKPVDVSKFGVIFAGAQKNVGSAGVTVVIVRDDLLGFALRECPSVLEYKVQAGNSSLYNTPPCFSIYVMGLVLEWIKNNGGAAAMEKLSSIKSQTIYEIIDNSQGFYVCPVEPQNRSKMNIPFRIGNAKGDDALEKRFLDKALELNMLSLKGHRSVGGIRASLYNAVTIEDVQKLAAFMKKFLEMHQL

SEQ ID NO: 92 - protein, 370 aa, synthetic construct
MDAPRQVVNFGPGPAKLPHSVLLEIQKELLDYKGVGISVLEMSHRSSDFAKIINNTENLVRELLAVPDNYKVIFLQGGGCGQFSAVPLNLIGLKAGRCADYVVTGAWSAKAAEEAKKFGTINIVHPKLGSYTKIPDPSTWNLNPDASYVYYCANETVHGVEFDFIPDVKGAVLVCDMSSNFLSKPVDVSKFGVIFAGAQKNVGSAGVTVVIVRDDLLGFALREWPSVLEYKVQAGNSSLYNTPPCFSIYVMGLVLEWIKNNGGAAAMEKLSSIKSQTIYEIIDNSQGFYVCPVEPQNRSKMNIPFRIGNAKGDDALEKRFLDKALELNMLSLKGHRSVGGIRASLYNAVTIEDVQKLAAFMKKFLEMHQL

SEQ ID NO: 93 - protein, 370 aa, synthetic construct
MDAPRQVVNFGPGPAKLPHSVLLEIQKELLDYKGVGISVLEMSHRSSDFAKIINNTENLVPELLAVPDNYKVIFLQGGGCGQFSAVPLNLIGLKAGRCADYVVTGAWSAKAAEEAKKFGTINIVHPKLGSYTKIPDPSTWNLNPDASYVYYCANETVHGVEFDFIPDVKGAVLVCDMSSNFLSKPVDVSKFGVIFAGAQKNVGSAGVTVVIVRDDLLGFALRECPSVLEYKVQAGNSSLYNTPPCFSIYVMGLVLEWIKNNGGAAAMEKLSSIKSQTIYEIIDNSQGFYVCPVEPQNRSKMNIPFRIGNAKGDDALEKRFLDKALELNMLSLKGHRSVGGIRASLYNAVTIEDVQKLAAFMKKFLEMHQL

SEQ ID NO: 94 - protein, 370 aa, synthetic construct
MDAPRQVVNFGPGPAKLPHSVLLEIQKELLDYKGVGISVLEMSHRSSDFAKIINNTENLVRELLAVPDNYKVIFLQGGGCGQFSAVPLNLIGLKAGRCADYVVTGAWSAKAAEEAKKFGTINIVHPKLGSYTKIPDPSTWNLNPDASYVYYCANETVHGVEFDFIPDVKGAVLVCDMPSNFLSKPVDVSKFGVIFAGAQKNVGSAGVTVVIVRDDLLGFALRECPSVLEYKVQAGNSSLYNTPPCFSIYVMGLVLEWIKNNGGAAAMEKLSSIKSQTIYEIIDNSQGFYVCPVEPQNRSKMNIPFRIGNAKGDDALEKRFLDKALELNMLSLKGHRSVGGIRASLYNAVTIEDVQKLAAFMKKFLEMHQL

SEQ ID NO: 95 - protein, 370 aa, synthetic construct
MDAPRQVVNFGPGPAKLPHSVLLEIQKELLDYKGVGISVLEMSHRSSDFAKIINNTENLVRELLAVPDNYKVIFLQGGGCGQFSAVPLNLIGLKAGRCADYVVTGAWSAKAAEEAKKFGTINIVHPKLGSYTKIPDPSTWNLNPDASYVYYWANETVHGVEFDFIPDVKGAVLVCDMSSNFLSKPVDVSKFGVIFAGAQKNVGSAGVTVVIVRDDLLGFALRECPSVLEYKVQAGNSSLYNTPPCFSIYVMGLVLEWIKNNGGAAAMEKLSSIKSQTIYEIIDNSQGFYVCPVEPQNRSKMNIPFRIGNAKGDDALEKRFLDKALELNMLSLKGHRSVGGIRASLYNAVTIEDVQKLAAFMKKFLEMHQL

SEQ ID NO: 96 - protein, 370 aa, synthetic construct
MDAPRQVVNFGPGPAKLPHSVLLEIQKELLDYKGVGISVLEMSHRSSDFAKIINNTENLVRELLAVPDNYKVIFLQGGGCGQFSAVPLNLIGLKAGRCADYVVTGAWSAKAPEEAKKFGTINIVHPKLGSYTKIPDPSTWNLNPDASYVYYCANETVHGVEFDFIPDVKGAVLVCDMSSNFLSKPVDVSKFGVIFAGAQKNVGSAGVTVVIVRDDLLGFALRECPSVLEYKVQAGNSSLYNTPPCFSIYVMGLVLEWIKNNGGAAAMEKLSSIKSQTIYEIIDNSQGFYVCPVEPQNRSKMNIPFRIGNAKGDDALEKRFLDKALELNMLSLKGHRSVGGIRASLYNAVTIEDVQKLAAFMKKFLEMHQL

SEQ ID NO: 97 - protein, 370 aa, synthetic construct
MDAPRQVVNFGPGPAKLPHSVLLEIQKELLDYKGVGISVLEMSHRSSDFAKIINNTENLVRELLAVPDNYKVIFLQGGGCGQFSAVPLNLIGLKAGRCADYVVTGAWSAKAAEEAKKFGTINIVHPKLGSYTKIPDPSTWNLNPDASYVYYCANETVHGVEFDFIPDVKGAVLVCDMSSNFLSKPVDVSKFGVIFAGAQKNVGSAGVTVVIVRDDLLGFALRECPSVLEYKVQAGNSSLYNPPPCFSIYVMGLVLEWIKNNGGAAAMEKLSSIKSQTIYEIIDNSQGFYVCPVEPQNRSKMNIPFRIGNAKGDDALEKRFLDKALELNMLSLKGHRSVGGIRASLYNAVTIEDVQKLAAFMKKFLEMHQL

SEQ ID NO: 98 - protein, 370 aa, synthetic construct
MDAPRQVVNFGPGPAKLPHSVLLEIQKELLDYKGVGISVLEMSHRSSDFAKIINNTENLVRELLAVPDNYKVIFLQGGGCGQFSAVPLNLIGLKAGRCADYVVTGAWSAKAAEEAKKFGTINIVHPKLGSYTKIPDPSTWNLNPDASYVYYCANETVHGVEFDFIPDVKGAVLVCDMSSNFLSKPVDVSKFGVIFAGAQKNVGSAGVTVVIVRDDLLGFALRECPSVLEYKVQAGNSSLYNTPPCFSIYVMGLVLEWIKNNGGAAAMEKLSSIKSQTIYEIIDNSQGFYVCPVEPQNRSKMNIPFRIGNAKGDDALEKRFLDKALELNMLSLKGHRSVGGIRASLYNAVTIEDVQKRAAFMKKFLEMHQL

SEQ ID NO: 99 - protein, 370 aa, synthetic construct
MDAPRQVVNFGPGPAKLPHSVLLEIQKELLDYKGVGISVLEMSHRSSDFAKIINNTENLVRELLAVPDNYKVIFLQGGGCGQFSAVPLNRIGLKAGRCADYVVTGAWSAKAAEEAKKFGTINIVHPKLGSYTKIPDPSTWNLNPDASYVYYCANETVHGVEFDFIPDVKGAVLVCDMSSNFLSKPVDVSKFGVIFAGAQKNVGSAGVTVVIVRDDLLGFALRECPSVLEYKVQAGNSSLYNTPPCFSIYVMGLVLEWIKNNGGAAAMEKLSSIKSQTIYEIIDNSQGFYVCPVEPQNRSKMNIPFRIGNAKGDDALEKRFLDKALELNMLSLKGHRSVGGIRASLYNAVTIEDVQKLAAFMKKFLEMHQL

SEQ ID NO: 100 - protein, 370 aa, synthetic construct
MDAPRQVVNFGPGPAKLPHSVLLEIQKELLDYKGVGISVLEMSHRSSDFAKIINNTENLVRELLAVPDNYKVIFLQGGGCGQFSAVPLNLIGLKAGRCADYVVTGAWSAKAAEEAKKFGTINIVHPKLGSYTKIPDPSTWNLNPDASYVYYCANETVHGVEFDFIPDVKGAVLVCDMSSNFLSKPVDVSKFGVIFAGAQKNVGSAGVTVVIVRDDLLGFALRECPSVLEYKVQAGNSSLYNTPPCFSIYVMGLVLEWIKNNGGAAAMEKLSSIKSQTIYEIIDNSQGFYVCPVEPQNRSKMNIPFRIGNAKGDDALEKRFLDKALELNMLSLKGDRSVGGIRASLYNAVTIEDVQKLAAFMKKFLEMHQL

SEQ ID NO: 101 - protein, 370 aa, synthetic construct
MDAPRQVVNFGPGPAKLPHSVLLEIQKELLDYKGVGISVLEMSHRSSDFAKIINNTENLVRELLAVPDNYKVIFLQGGGCGQFSAVPLNLIGLKAGRCADYVVTGAWSAKAAEEAKKFGTINIVHPKLGSYTKIPDPSTWNLNPDASYVYYCANETVHGVEFDFIPDVKGAVLVCDMSSNFLSKPVDVSKFGVIFAGAQKNVGSAGVTVVIVRDDLLGFALRECPSVLEYKVQAGNSSLYNTPPCFSIYVMGLVLEWIKNNGGAAAMEKLSSIKSQTIYEIIDNSQGFYVCPVEPQNRSKMKIPFRIGNAKGDDALEKRFLDKALELNMLSLKGHRSVGGIRASLYNAVTIEDVQKLAAFMKKFLEMHQL

SEQ ID NO: 102 - protein, 370 aa, synthetic construct
MDAPRQVVNFGPGPAKLPHSVLLEIQKELLDYKGVGISVLEMSHRSSDFAKIINNTENLVRELLAVPDNYKVIFLQGGGCGQFSAVPLNLIGLKAGRCADYVVTGARSAKAAEEAKKFGTINIVHPKLGSYTKIPDPSTWNLNPDASYVYYCANETVHGVEFDFIPDVKGAVLVCDMSSNFLSKPVDVSKFGVIFAGAQKNVGSAGVTVVIVRDDLLGFALRECPSVLEYKVQAGNSSLYNTPPCFSIYVMGLVLEWIKNNGGAAAMEKLSSIKSQTIYEIIDNSQGFYVCPVEPQNRSKMNIPFRIGNAKGDDALEKRFLDKALELNMLSLKGHRSVGGIRASLYNAVTIEDVQKLAAFMKKFLEMHQL

SEQ ID NO: 103 - protein, 370 aa, synthetic construct
MDAPRQVVNFGPGPAKLPHSVLLEIQKELLDYKGVGISVLEMSHRSSDFAKIINNTENLVRELLAVPDNYKVIFLQGGGCGQFSAVPLNLIGLKAGRCADYVVTGAWSAKAAEEAKKFGTINIVHPKLGSYTKIPDPSTWNLNPDASYVYYCANETVHGVEFDFIPDVKGAVLVCDMSSNFLSKPVDVSKFGVIFAGAQKNVGSAGVTVVIVRDDLLGFALRECPSVLEYKVQAGNSSLYNTPPCFSIYVMGLVLEWIKNNGGAAAMEKLSSIKSQTIYEIIDNSQGFYVCPVEPQNRSKMNIPFRIGNAKGDDALEKRFLDKALELNMLSLKGHRSVGGIRASRYNAVTIEDVQKLAAFMKKFLEMHQL

SEQ ID NO: 104 - protein, 370 aa, synthetic construct
MDAPRQVVNFGPGPAKLPHSVLLEIQKELLDYKGVGISVLEMSHRSSDFAKIINNTENLVRELLAVPDNYKVIFLQGGGCGQFSAVPLNLIGLKAGRCADYVVTGAWSAKAAEEAKKFGTINIVHPKLGSYTKIPDPSTWNLNPDASYVYYCANETVHGVEFDFIPDVKGAVLVCDMSSNFLSKPVDVSKFGVIFAGAQKNVGSAGVTVVIVRDDLLGFALRECPSVLEYKVQAGNSSLYNTPPCFSIYVMGLVLEWIKNNGGAAAMEKLSSIKSQTIYEIIDNSQGFDVCPVEPQNRSKMNIPFRIGNAKGDDALEKRFLDKALELNMLSLKGHRSVGGIRASLYNAVTIEDVQKLAAFMKKFLEMHQL

SEQ ID NO: 105 - protein, 370 aa, synthetic construct
MDAPRQVVNFGPGPAKLPHSVLLEIQKELLDYKGVGISVLEMSHRSSDFAKIINNTENLVRELLAVPDNYKVIFLQGGGCGQFSAVPLNLIGLKAGRCADYVVTGAWLAKAAEEAKKFGTINIVHPKLGSYTKIPDPSTWNLNPDASYVYYCANETVHGVEFDFIPDVKGAVLVCDMSSNFLSKPVDVSKFGVIFAGAQKNVGSAGVTVVIVRDDLLGFALRECPSVLEYKVQAGNSSLYNTPPCFSIYVMGLVLEWIKNNGGAAAMEKLSSIKSQTIYEIIDNSQGFYVCPVEPQNRSKMNIPFRIGNAKGDDALEKRFLDKALELNMLSLKGHRSVGGIRASLYNAVTIEDVQKLAAFMKKFLEMHQL

SEQ ID NO: 106 - protein, 370 aa, synthetic construct
MDAPRQVVNFGPGPAKLPHSVLLEIQKELLDYKGVGISVLEMSHRSSDFAKIINNTENLVRELLAVPDNYKVIFLQGGGCGQFSAVPLNLIGLKAGRCADYVVTGAWSAKAAEEAKKFGTINIVHPKLGSYTKIPDPSTWNLNPDASSVYYCANETVHGVEFDFIPDVKGAVLVCDMSSNFLSKPVDVSKFGVIFAGAQKNVGSAGVTVVIVRDDLLGFALRECPSVLEYKVQAGNSSLYNTPPCFSIYVMGLVLEWIKNNGGAAAMEKLSSIKSQTIYEIIDNSQGFYVCPVEPQNRSKMNIPFRIGNAKGDDALEKRFLDKALELNMLSLKGHRSVGGIRASLYNAVTIEDVQKLAAFMKKFLEMHQL

SEQ ID NO: 107 - protein, 370 aa, synthetic construct
MDAPRQVVNFGPGPAKLPHSVLLEIQKELLDYKGVGISVLEMSHRSSDFAKIINNTENLVRELLAVPDNYKVIFLQGGGCGQFSAVPLNLIGLKAGRCADSVVTGAWSAKAAEEAKKFGTINIVHPKLGSYTKIPDPSTWNLNPDASYVYYCANETVHGVEFDFIPDVKGAVLVCDMSSNFLSKPVDVSKFGVIFAGAQKNVGSAGVTVVIVRDDLLGFALRECPSVLEYKVQAGNSSLYNTPPCFSIYVMGLVLEWIKNNGGAAAMEKLSSIKSQTIYEIIDNSQGFYVCPVEPQNRSKMNIPFRIGNAKGDDALEKRFLDKALELNMLSLKGHRSVGGIRASLYNAVTIEDVQKLAAFMKKFLEMHQL

SEQ ID NO: 108 - protein, 370 aa, synthetic construct
MDAPRQVVNFGPGPAKLPHSVLLEIQKELLDYKGVGISVLEMSHRSSDFAKIINNTENLVRELLAVPDNYKVIFLQGGGCGQFSAVPLNLIGLKAGRCADYVVTGAWSAKAAEEAKKFGTINIVHPKLGSYTKIPDPSTWNLNPDASYVYYCANETVHGVEFDFIPDVKGAVLVCDMSSNFLSKPVDVSKFGVIFAGAQENVGSAGVTVVIVRDDLLGFALRECPSVLEYKVQAGNSSLYNTPPCFSIYVMGLVLEWIKNNGGAAAMEKLSSIKSQTIYEIIDNSQGFYVCPVEPQNRSKMNIPFRIGNAKGDDALEKRFLDKALELNMLSLKGHRSVGGIRASLYNAVTIEDVQKLAAFMKKFLEMHQL

SEQ ID NO: 109 - protein, 370 aa, synthetic construct
MDAPRQVVNFGPGPAKLPHSVLLEIQKELLDYKGVGISVLEMSHRSSDFAKIINNTENLVRELLAVPDNYKVIFLQGGGCGQFSAVPLNLIGLKAGRCADYVVTGAWSAKAAEEAKKFGTINIVHPKLGSYTKIPDPSTWNLNPDASYVYYCANETVHGVEFDFIPDVKGAVLVCDMSSNFLSKPVDVSKFGVIFAGAQKNVGSAGVTVVIVRDDLLGFALRECPSVLEYKVQAGNSSLYNTPPCFSIYVMGLVREWIKNNGGAAAMEKLSSIKSQTIYEIIDNSQGFYVCPVEPQNRSKMNIPFRIGNAKGDDALEKRFLDKALELNMLSLKGHRSVGGIRASLYNAVTIEDVQKLAAFMKKFLEMHQL

SEQ ID NO: 110 - protein, 370 aa, synthetic construct
MDAPRQVVNFGPGPAKLPHSVLLEIQKELLDYKGVGISVLEMSHRSSDFAKIINNTENLVRELLAVPDNYKVIFLQGGGCGQFSAVPLNLIGLKAGRCADYVVTGAWSAKAAEEAKKFGTINIVHPKLGSYTKIPDPSTWNLNPDASYVYYCANETVHGVEFDFIPDVKGAVLDCDMSSNFLSKPVDVSKFGVIFAGAQKNVGSAGVTVVIVRDDLLGFALRECPSVLEYKVQAGNSSLYNTPPCFSIYVMGLVLEWIKNNGGAAAMEKLSSIKSQTIYEIIDNSQGFYVCPVEPQNRSKMNIPFRIGNAKGDDALEKRFLDKALELNMLSLKGHRSVGGIRASLYNAVTIEDVQKLAAFMKKFLEMHQL

SEQ ID NO: 111 - protein, 370 aa, synthetic construct
MDAPRQVVNFGPGPAKLPHSVLLEIQKELLDYKGVGISVLEMSHRSSDFAKIINNTENLVRELLAVPDNYKVIFLQGSGCGQFSAVPLNLIGLKAGRCADYVVTGAWSAKAAEEAKKFGTINIVHPKLGSYTKIPDPSTWNLNPDASYVYYCANETVHGVEFDFIPDVKGAVLVCDMSSNFLSKPVDVSKFGVIFAGAQKNVGSAGVTVVIVRDDLLGFALRECPSVLEYKVQAGNSSLYNTPPCFSIYVMGLVLEWIKNNGGAAAMEKLSSIKSQTIYEIIDNSQGFYVCPVEPQNRSKMNIPFRIGNAKGDDALEKRFLDKALELNMLSLKGHRSVGGIRASLYNAVTIEDVQKLAAFMKKFLEMHQL

SEQ ID NO: 112 - protein, 370 aa, synthetic construct
MDAPRQVVNFGPGPAKLPHSVLLEIQKELLDYKGVGISVLEMSHRSSDFAKIINNTENLVRELLAVPDNYKVIFLQGGGCGQFSAVPLNLIGLKAGRCADYVVTGAWSAKAAEEAKKFGTINIVHPKLGSYTKIPDPSTWNLNPDASYVYYCANETVHGVEFDFIPDVKGAVLVCDMSSNFLSKPVDVSKFGVIFAGAQKNVGSAGVTVVIVRDDLLGFALRECPSVLEYKVQAGNSSLYNTPPCFSIYVRGLVLEWIKNNGGAAAMEKLSSIKSQTIYEIIDNSQGFYVCPVEPQNRSKMNIPFRIGNAKGDDALEKRFLDKALELNMLSLKGHRSVGGIRASLYNAVTIEDVQKLAAFMKKFLEMHQL

SEQ ID NO: 113 - protein, 370 aa, synthetic construct
MDAPRQVVNFGPGPAKLPHSVLLEIQKELLDYKGVGISVLEMSHRSSDFAKIINNTENLVRELLAVPDNYKVIFLQGGGCGQFSAVPLNLIGLKAGRCADYVVTGAWSAKAAEEAKKFGTINIVHPKLGSYTKIPDPSTWNLNPDASYVYYCANETVHGVEFDFIPDVKGAVLVCDMSSNFLSKPVDVSKFGVIFAGAQKYVGSAGVTVVIVRDDLLGFALRECPSVLEYKVQAGNSSLYNTPPCFSIYVMGLVLEWIKNNGGAAAMEKLSSIKSQTIYEIIDNSQGFYVCPVEPQNRSKMNIPFRIGNAKGDDALEKRFLDKALELNMLSLKGHRSVGGIRASLYNAVTIEDVQKLAAFMKKFLEMHQL

SEQ ID NO: 114 - protein, 370 aa, synthetic construct
MDAPRQVVNFGPGPAKLPHSVLLEIQKELLDYKGVGISVLEMSHRSSDFAKIINNTENLVRELLAVPDNYKVIFLQGGGCGQFSAVPLNLIGLKAGRCADYVVTGAWSAKAAEEAKKFGTINIVHPKLGSYTKIPDPSTWNLNPDAFYVYYCANETVHGVEFDFIPDVKGAVLVCDMSSNFLSKPVDVSKFGVIFAGAQKNVGSAGVTVVIVRDDLLGFALRECPSVLEYKVQAGNSSLYNTPPCFSIYVMGLVLEWIKNNGGAAAMEKLSSIKSQTIYEIIDNSQGFYVCPVEPQNRSKMNIPFRIGNAKGDDALEKRFLDKALELNMLSLKGHRSVGGIRASLYNAVTIEDVQKLAAFMKKFLEMHQL

SEQ ID NO: 115 - protein, 370 aa, synthetic construct
MDAPRQVVNFGPGPAKLPHSVLLEIQKELLDYKGVGISVLEMSHRSSDFAKIINNTENLVRELLAVPDNYKVIFLQGGGCGQFSAVPLNLIGLKAGRCADYVVTGACSAKAAEEAKKFGTINIVHPKLGSYTKIPDPSTWNLNPDASYVYYCANETVHGVEFDFIPDVKGAVLVCDMSSNFLSKPVDVSKFGVIFAGAQKNVGSAGVTVVIVRDDLLGFALRECPSVLEYKVQAGNSSLYNTPPCFSIYVMGLVLEWIKNNGGAAAMEKLSSIKSQTIYEIIDNSQGFYVCPVEPQNRSKMNIPFRIGNAKGDDALEKRFLDKALELNMLSLKGHRSVGGIRASLYNAVTIEDVQKLAAFMKKFLEMHQL

SEQ ID NO: 116 - protein, 370 aa, synthetic construct
MDAPRQVVNFGPGPAKLPHSVLLEIQKELLDYKGVGISVLEMSHRSSDFAKIINNTENLVRELLAVPDNYKVIFLQGGGCGQFSAVPLNLIGLKAGRCADYVVTGAWSAKAAEEAKKFGTINIVHPKLGSYTKIPDPSTWNLNPDASYVYYCANETVHGVEFDFIPDVKGAVLVCDMSSNFLSKPVDVSKFGVIFAGAQKNVDSAGVTVVIVRDDLLGFALRECPSVLEYKVQAGNSSLYNTPPCFSIYVMGLVLEWIKNNGGAAAMEKLSSIKSQTIYEIIDNSQGFYVCPVEPQNRSKMNIPFRIGNAKGDDALEKRFLDKALELNMLSLKGHRSVGGIRASLYNAVTIEDVQKLAAFMKKFLEMHQL

SEQ ID NO: 117 - protein, 370 aa, synthetic construct
MDAPRQVVNFGPGPAKLPHSVLLEIQKELLDYKGVGISVLEMSHRSSDFAKIINNTENLVRELLAVPDNYKVIFLQGGGCGQFSAVPLNLIGLKAGRCADYVVTGAWSAKAAEEAKKFGTINIVHPKLGSYTKIPDPSTWNLNPDASYVYYCANETVHGVEFDFIPDVKGAVLVCDMSSNFLSKPVDVSKFGVIFAGAQKNVGSAGVTVVIVRDDLLGFALRECPSVLEYKVQAGNSSLYNRPPCFSIYVMGLVLEWIKNNGGAAAMEKLSSIKSQTIYEIIDNSQGFYVCPVEPQNRSKMNIPFRIGNAKGDDALEKRFLDKALELNMLSLKGHRSVGGIRASLYNAVTIEDVQKLAAFMKKFLEMHQL

SEQ ID NO: 118 - protein, 370 aa, synthetic construct
MDAPRQVVNFGPGPAKLPHSVLLEIQKELLDYKGVGISVLEMSHRSSDFAKIINNTENLVRELLAVPDNYKVIFLQGGGCGQFSAVPLNLIGLKAGRCADYEVTGAWSAKAAEEAKKFGTINIVHPKLGSYTKIPDPSTWNLNPDASYVYYCANETVHGVEFDFIPDVKGAVLVCDMSSNFLSKPVDVSKFGVIFAGAQKNVGSAGVTVVIVRDDLLGFALRECPSVLEYKVQAGNSSLYNTPPCFSIYVMGLVLEWIKNNGGAAAMEKLSSIKSQTIYEIIDNSQGFYVCPVEPQNRSKMNIPFRIGNAKGDDALEKRFLDKALELNMLSLKGHRSVGGIRASLYNAVTIEDVQKLAAFMKKFLEMHQL

SEQ ID NO: 119 - protein, 370 aa, synthetic construct
MDAPRQVVNFGPGPAKLPHSVLLEIQKELLDYKGVGISVLEMSHRSSDFAKIINNTENLVRELLAVPDNYKVIFLQGGGCGQFSAVPLNLIGLKAGRCADYVVTGAWSAKAAEEAKKFGTINIVHPKLGSYTKIPDPSTWNLNPDASYVYYCANETVHGVEFDFIPDVKGAVLVCDMSSNFLSKPVDVSKFGVIFAGAQKNVGSAGVTVVIVRDDLLGFALRECPSVLEYKVQAGNSSLYNTPPCFSIYVMGLVLEWIKNNGGAAAMEKLSSIKSQTIYEIIDNSQGFYVCPVEPQNRRKMNIPFRIGNAKGDDALEKRFLDKALELNMLSLKGHRSVGGIRASLYNAVTIEDVQKLAAFMKKFLEMHQL

SEQ ID NO: 120 - protein, 370 aa, synthetic construct
MDAPRQVVNFGPGPAKLPHSVLLEIQKELLDYKGVGISVLEMSHRSSDFAKIINNTENLVRELLAVPDNYKVIFLQGGGCGQFSAVPLNLIGLKAGRCADYVVTGAWSAKAAEEAKKFGTINIVHPKLGSYTKIPDPSTWNLNPDASYVYYCANETVHGVEFDFIPDVKGAVLVCDMSSNFLSKPVDVSKFGVIFAGALKNVGSAGVTVVIVRDDLLGFALRECPSVLEYKVQAGNSSLYNTPPCFSIYVMGLVLEWIKNNGGAAAMEKLSSIKSQTIYEIIDNSQGFYVCPVEPQNRSKMNIPFRIGNAKGDDALEKRFLDKALELNMLSLKGHRSVGGIRASLYNAVTIEDVQKLAAFMKKFLEMHQL

SEQ ID NO: 121 - protein, 370 aa, synthetic construct
MDAPRQVVNFGPGPAKLPHSVLLEIQKELLDYKGVGISVLEMSHRSSDFAKIINNTENLVRELLAVPDNYKVIFLQGGGCGQFSAVPLNLIGLKAGRCADYVVTGAWSAKAAEEAKKFGTINIVHPKLGSYTKIPDPSTWNLNPDASYVYYCANETVHGVEFDFIPDVKGAVLVCDMSSNFLSKPVDVSKFGVIFAGAQKNVVSAGVTVVIVRDDLLGFALRECPSVLEYKVQAGNSSLYNTPPCFSIYVMGLVLEWIKNNGGAAAMEKLSSIKSQTIYEIIDNSQGFYVCPVEPQNRSKMNIPFRIGNAKGDDALEKRFLDKALELNMLSLKGHRSVGGIRASLYNAVTIEDVQKLAAFMKKFLEMHQL

SEQ ID NO: 122 - protein, 370 aa, synthetic construct
MDAPRQVVNFGPGPAKLPHSVLLEIQKELLDYKGVGISVLEMSHRSSDFAKIINNTENLVRELLAVPDNYKVIFLQGGGCGQFSAVPLNLIGLKAGRCADYVVTGAWSAKAAEEAKKFGTINIVHPKLGSYTKIPDPSTWNLNPDASYVYYCANETVHGVEFDFIPDVKGAVLVCDMSSNFLSKPVDVSKFGVIFAGAQKNVGSAGVTVVIVRDDLLGFALRECPSVLEYKVQAGNSSLYNKPPCFSIYVMGLVLEWIKNNGGAAAMEKLSSIKSQTIYEIIDNSQGFYVCPVEPQNRSKMNIPFRIGNAKGDDALEKRFLDKALELNMLSLKGHRSVGGIRASLYNAVTIEDVQKLAAFMKKFLEMHQL

SEQ ID NO: 123 - protein, 370 aa, synthetic construct
MDAPRQVVNFGPGPAKLPHSVLLEIQKELLDYKGVGISVLEMSHRSSDFAKIINNTENLVRELLAVPDNYKVIFLQGGGCGQFSAVPLNLIGLKAGRCADYVVTGAWSAKAAEEAKKFGTINIVHPKLGSYTKIPDPSTWNLNPDASYVYYCANETVHGVEFDFIPDVKGAVLVCDMSSNFLSKPVDVSKFGVIFAGAQKNVGSAGVTVVIVRDDLLGFALRECPSVLEYKVQAGNSSLYNTPPCFSIYVMGLVLEWIKNNGGAAAMEKLSSIKSQTIYEIIDNSQGFYVCPVEPQNRSKMNIPFRIGNAKGDDALEKRFLDKALELNMLSLKGHRSVGGIRAYLYNAVTIEDVQKLAAFMKKFLEMHQL

SEQ ID NO: 124 - protein, 370 aa, synthetic construct
MDAPRQVVNFGPGPAKLPHSVLLEIQKELLDYKGVGISVLEMSHRSSDFAKIINNTENLVRELLAVPDNYKVIFLQGGGCGQFSAVPLNLIGLKAGRCADYVVTGAWSAKAAEEAKKFGTINIVHPKLGSYTKIPDPSTWNLNPDASYVYYCANETVHGVEFDFIPDVKGAVLVCDMSSNFLSKPVDVSKFGVIFAGAQKNVGSAGVTVVIVPDDLLGFALRECPSVLEYKVQAGNSSLYNTPPCFSIYVMGLVLEWIKNNGGAAAMEKLSSIKSQTIYEIIDNSQGFYVCPVEPQNRSKMNIPFRIGNAKGDDALEKRFLDKALELNMLSLKGHRSVGGIRASLYNAVTIEDVQKLAAFMKKFLEMHQL

SEQ ID NO: 125 - protein, 370 aa, synthetic construct
MDAPRQVVNFGPGPAKLPHSVLLEIQKELLDYKGVGISVLEMSHRSSDFAKIINNTENLVRELLAVPDNYKVIFLQGGGCGQFSAVPLNLIGLKAGRCADYVVTGAWSAKAAEEAKKFGTINIVHPKLGSYTKIPDPSTWNLNPDASYVYYCANETVHGVEFDFIPDVKGAVLVCEMSSNFLSKPVDVSKFGVIFAGAQKNVGSAGVTVVIVRDDLLGFALRECPSVLEYKVQAGNSSLYNTPPCFSIYVMGLVLEWIKNNGGAAAMEKLSSIKSQTIYEIIDNSQGFYVCPVEPQNRSKMNIPFRIGNAKGDDALEKRFLDKALELNMLSLKGHRSVGGIRASLYNAVTIEDVQKLAAFMKKFLEMHQL

SEQ ID NO: 126 - protein, 370 aa, synthetic construct
MDAPRQVVNFGPGPAKLPHSVLLEIQKELLDYKGVGISVLEMSHRSSDFAKIINNTENLVRELLAVPDNYKVIFLQGGGCGQFSAVPLNLIGLKAGRCADYVVTGAWSAKAAEEAKKFGTINIVHPKLGSYTKIPDPSTWNLNPDASYVYYCANETVHGVEFDFIPDVKGAVLVCDMSSNFLSKPVDVSKFGVIFAGAQKNVGSAGVTVVIVRDDLLGFALRECPSVLEYKVQAGNSSLYNTPPCFSIYVMGLVLEWIKNNGGAAAMEKLSSIKSQTIYEIIDNSQGFYVCPVEPQNRIKMNIPFRIGNAKGDDALEKRFLDKALELNMLSLKGHRSVGGIRASLYNAVTIEDVQKLAAFMKKFLEMHQL

SEQ ID NO: 127 - protein, 370 aa, synthetic construct
MDAPRQVVNFGPGPAKLPHSVLLEIQKELLDYKGVGISVLEMSHRSSDFAKIINNTENLVRELLAVPDNYKVIFLQGGGCGQFSAVPLNLIGLKAGRCADYVVTGAWSAKAAEEAKKFGTINIVHPKLGSYTKIPDPSTWNLNPDASYVYYCANETVHGVEFDFIPDVKGAVLVCDMSSNFLSKPVDVSKFGVIFAGAQKNVGSAGVTVVIVRDDLLGFALRECPSVLEYKVQAGNSSLYNTPPCFSIYVMGLVLEWIKNNGGAAAMEKLSSIKSQTIYEIIDNSQGFYVCPVEPQNRSKMNIPFRIGNAKGDDALEKRFLDKALELNMLSLKGHRSVGGIWASLYNAVTIEDVQKLAAFMKKFLEMHQL

SEQ ID NO: 128 - protein, 370 aa, synthetic construct
MDAPRQVVNFGPGPAKLPHSVLLEIQKELLDYKGVGISVLEMSHRSSDFAKIINNTENLVRELLAVPDNYKVIFLQGGGCGQFSAVPLNLIGLKAGRCADYVVTGAWSAKAAEEAKKFGTINIVHPKLGSYTKIPDPSTWNLNPDASYVYYCANETVHGVEFDFIPDVKGAVLVCDMSSNFLSKPVDVSKFGVIFAGAQKNVGSAGVTVVIVRDDLLGFALRECPSVLEYKVQAGNSSLYNTPPCFSIYVMGLVLEWIKNNGGAAAMEKLSSIKSQTIYEIIDNSQGFSVCPVEPQNRSKMNIPFRIGNAKGDDALEKRFLDKALELNMLSLKGHRSVGGIRASLYNAVTIEDVQKLAAFMKKFLEMHQL

SEQ ID NO: 129 - protein, 370 aa, synthetic construct
MDAPRQVVNFGPGPAKLPHSVLLEIQKELLDYKGVGISVLEMSHRSSDFAKIINNTENLVRELLAVPDNYKVIFLQGGGCGQFSAVPLNLIGLKAGRCADYVVTGAWSAKAAEEAKKFGTINIVHPKLGSYTKIPDPSTWNLNPDASYVYYCANETVHGVEFDFIPDVKGAVLFCDMSSNFLSKPVDVSKFGVIFAGAQKNVGSAGVTVVIVRDDLLGFALRECPSVLEYKVQAGNSSLYNTPPCFSIYVMGLVLEWIKNNGGAAAMEKLSSIKSQTIYEIIDNSQGFYVCPVEPQNRSKMNIPFRIGNAKGDDALEKRFLDKALELNMLSLKGHRSVGGIRASLYNAVTIEDVQKLAAFMKKFLEMHQL

SEQ ID NO: 130 - protein, 370 aa, synthetic construct
MDAPRQVVNFGPGPAKLPHSVLLEIQKELLDYKGVGISVLEMSHRSSDFAKIINNTENLVRELLAVPDNYKVIFLQGGGCGQFSAVPLNLIGLKAGRCADYVVTGALSAKAAEEAKKFGTINIVHPKLGSYTKIPDPSTWNLNPDASYVYYCANETVHGVEFDFIPDVKGAVLVCDMSSNFLSKPVDVSKFGVIFAGAQKNVGSAGVTVVIVRDDLLGFALRECPSVLEYKVQAGNSSLYNTPPCFSIYVMGLVLEWIKNNGGAAAMEKLSSIKSQTIYEIIDNSQGFYVCPVEPQNRSKMNIPFRIGNAKGDDALEKRFLDKALELNMLSLKGHRSVGGIRASLYNAVTIEDVQKLAAFMKKFLEMHQL

SEQ ID NO: 131 - protein, 370 aa, synthetic construct
MDAPRQVVNFGPGPAKLPHSVLLEIQKELLDYKGVGISVLEMSHRSSDFAKIINNTENLVRELLAVPDNYKVIFLQGGGCGQFSAVPLNLIGLKAGRCADYVVTGAWSAKAAEEAKKFGTINIVHPKLGSYTKIPDPSTWNLNPDAPYVYYCANETVHGVEFDFIPDVKGAVLVCDMSSNFLSKPVDVSKFGVIFAGAQKNVGSAGVTVVIVRDDLLGFALRECPSVLEYKVQAGNSSLYNTPPCFSIYVMGLVLEWIKNNGGAAAMEKLSSIKSQTIYEIIDNSQGFYVCPVEPQNRSKMNIPFRIGNAKGDDALEKRFLDKALELNMLSLKGHRSVGGIRASLYNAVTIEDVQKLAAFMKKFLEMHQL

SEQ ID NO: 132 - protein, 370 aa, synthetic construct
MDAPRQVVNFGPGPAKLPHSVLLEIQKELLDYKGVGISVLEMSHRSSDFAKIINNTENLVRELLAVPDNYKVIFLQGGGCGQFSAVPLNLIGLKAGRCADYVVTGAWSAKAAEEAKKFGTINIVHPKLGSYTKIPDPSTWNLNPDASYVYYCANETVHGVEFDFIPDVKGAVLVCDMSSNFLSKPVDVSKFGVIFAGAQKNVGSAGVTVVIVRDDLLGFALRECPSVLEYKVQAGNSSLYNTPPCFSIYVMGLVLEWIKNNGGAAAMEKLSSIKSQTIYEIIDNSQGFYVCPVEPQNRSKMNIPFRIGNAKGDDALEKRFLDKALELNMLSWKGHRSVGGIRASLYNAVTIEDVQKLAAFMKKFLEMHQL

SEQ ID NO: 133 - protein, 370 aa, synthetic construct
MDAPRQVVNFGPGPAKLPHSVLLEIQKELLDYKGVGISVLEMSHRSSDFAKIINNTENLVRELLAVPDNYKVIFLQGGGCGQFSAVPLNLIGLKAGRCADYVVTGAWSAKAAEEAKKFGTINIVHPKLGSYTKIPDPSTWNLNPDASYVYYCANETVHGVEFDFIPDVKGAVLVCDMSSNFLSKPVDVSKFGVIFAGAQKNVGSAGVTVVIVRDDLLGFALRECPSVLEYKVQAGNSSLYNTPPCFSIYVMGLVLEWIKNNGGAAAMEKLSSIKSQTIYEIIDNSQGFYVCPVEPQNRSKMNIPFRIGNAKGDDALEKRFLDKALELNMLSLKGHRSVGGIRAFLYNAVTIEDVQKLAAFMKKFLEMHQL

SEQ ID NO: 134 - protein, 370 aa, synthetic construct
MDAPRQVVNFGPGPAKLPHSVLLEIQKELLDYKGVGISVLEMSHRSSDFAKIINNTENLVRELLAVPDNYKVIFLQGGGCGQFSAVPLNLIGLKAGRCADYVVTGAWSAKAAEEAKKFGTINIVHPKLGSYTKIPDPSTWNLNPDASYVYYCANETVHGVEFDFIPDVKGAVLVCDMSSNFLSKPVDVSKFGVIFAGAQKNVGSAGVTVVIVRDDLLGFALRECPSVLEYKVQAGNSSLYNTPPCFSIYVMGLVLEWIKNNGGAAAMEKLSSIKSQTIYEIIDNSQGFYVCPVEPQNRSKMNIPFRIGNAKGDDALEKRFLDKALELNMLSLKGHRSVGGIRASLYNAVTIEDVQKLAAFRKKFLEMHQL

SEQ ID NO: 135 - protein, 370 aa, synthetic construct
MDAPRQVVNFGPGPAKLPHSVLLEIQKELLDYKGVGISVLEMSHRSSDFAKIINNTENLVRELLAVPDNDKVIFLQGGGCGQFSAVPLNLIGLKAGRCADYVVTGAWSAKAAEEAKKFGTINIVHPKLGSYTKIPDPSTWNLNPDASYVYYCANETVHGVEFDFIPDVKGAVLVCDMSSNFLSKPVDVSKFGVIFAGAQKNVGSAGVTVVIVRDDLLGFALRECPSVLEYKVQAGNSSLYNTPPCFSIYVMGLVLEWIKNNGGAAAMEKLSSIKSQTIYEIIDNSQGFYVCPVEPQNRSKMNIPFRIGNAKGDDALEKRFLDKALELNMLSLKGHRSVGGIRASLYNAVTIEDVQKLAAFMKKFLEMHQL

SEQ ID NO: 136 - protein, 370 aa, synthetic construct
MDAPRQVVNFGPGPAKLPHSVLLEIQKELLDYKGVGISVLEMSHRSSDFAKIINNTENLVRELLAVPDNYKVIFLQGGGCGQFSAVPLNLIGLKAGRCADYVVTGAWSAKAAEEAKKFGTINIVHPKLGSYTKIPDPSTWNLNPDASYVYYCANETVHGVEFDFIPDVKGAVLVCDMSSNFLSKPVDVSKFGVIFAGAQKNVGSAGVTVVIVRDDLLGFALRECPSVLEYKVQAGNSSLYNTPPCFSIYVMGLVLEWIKNNGGAAAMEKLSSIKSQTIYEIIDNSQGFYVCPVEPQNRSKMNIPFRIGNAKGDDALEKRFLDKALELNMLSLKGHRSVGGIPASLYNAVTIEDVQKLAAFMKKFLEMHQL

SEQ ID NO: 137 - protein, 370 aa, synthetic construct
MDAPRQVVNFGPGPAKLPHSVLLEIQKELLDYKGVGISVLEMSHRSSDFAKIINNTENLVRELLAVPDNYKVIFLQGGGCGQFSAVPLNLIGLKAGRCADYVVTGAWSAKAAEEAKKFGTINIVHPKLGSYTKIPDPSTWNLNPDASYVYYCANETVHGVEFDFIPDVKGAVLVCDMSSNFLSKPVDVSKFGVIFAGAQKNVGSAGVTVVIVRDDLLGFALRECPSVLEYKVQAGNSSLYNTPPCFSIYVMGLVLEWIKNNGGAAAMEKLSSIKSQTIYEIIDNSQGFYVCPVEPQNRSKMNIPFPIGNAKGDDALEKRFLDKALELNMLSLKGHRSVGGIRASLYNAVTIEDVQKLAAFMKKFLEMHQL

SEQ ID NO: 138 - protein, 370 aa, synthetic construct
MDAPRQVVNFGPGPAKLPHSVLLEIQKELLDYKGVGISVLEMSHRSSDFAKIINNTENLVRELLAVPDNYKVIFLQGGGCGQFSAVPLNLIGLKAGRCADYVVTGAWSAKAAEEAKKFGTINIVHPKLGSYTKIPDPSTWNLNPDASYVYYCANETVHGVEFDFIPDVKGAVLVCDMSSNFLSKPVDVSKFGVIFAGAQKNVGSAGVTVVIVRDDLLGFALRECPSVLEYKVQAGNSSLYNTPPCFSIYVMGLVLEWIKNNGGAAAMEKLSSIKSQTNYEIIDNSQGFYVCPVEPQNRSKMNIPFRIGNAKGDDALEKRFLDKALELNMLSLKGHRSVGGIRASLYNAVTIEDVQKLAAFMKKFLEMHQL

SEQ ID NO: 139 - protein, 370 aa, synthetic construct
MDAPRQVVNFGPGPAKLPHSVLLEIQKELLDYKGVGISVLEMSHRSSDFAKIINNTENLVRELLAVPDNYKVIFLQGGGCGQFSAVPLNLIGLKAGRCADYVVTGAWSAKAAEEAKKFGTINIVHPKLGSYTKIPDPSTWNLNPDASYVNYCANETVHGVEFDFIPDVKGAVLVCDMSSNFLSKPVDVSKFGVIFAGAQKNVGSAGVTVVIVRDDLLGFALRECPSVLEYKVQAGNSSLYNTPPCFSIYVMGLVLEWIKNNGGAAAMEKLSSIKSQTIYEIIDNSQGFYVCPVEPQNRSKMNIPFRIGNAKGDDALEKRFLDKALELNMLSLKGHRSVGGIRASLYNAVTIEDVQKLAAFMKKFLEMHQL

SEQ ID NO: 140 - protein, 370 aa, synthetic construct
MDAPRQVVNFGPGPAKLPHSVLLEIQKELLDYKGVGISVLEMSHRSSDFAKIINNTENLVRELLAVPDNYKVIFLQGGGCGQFSAVPLNLIGLKAGRCADYVVTGAWSAKAAEEAKKFGTINIVHPKLGSYTKIPDPSTWNLNPDASYVYYCANETVHGVEFDFIPDVKGAVLVCDMSSNFLSKPVDVSKFGVIFAGAQKNVGSAGVTVVIVRDDLLGFALRECPSVLEYKVQAGNSSLYNTRPCFSIYVMGLVLEWIKNNGGAAAMEKLSSIKSQTIYEIIDNSQGFYVCPVEPQNRSKMNIPFRIGNAKGDDALEKRFLDKALELNMLSLKGHRSVGGIRASLYNAVTIEDVQKLAAFMKKFLEMHQL

SEQ ID NO: 141 - protein, 370 aa, synthetic construct
MDAPRQVVNFGPGPAKLPHSVLLEIQKELLDYKGVGISVLEMSHRSSDFAKIINNTENLVRELLAVPDNYKVIFLQGGGCGQFSAVPLNLIGLKAGRCADYVVTGAWSAKAAEEAKKFGTINIVHPKLGSYTKIPDPSTWNLNPDASYVYYCANETVHGVEFDFIPDVKGAVLVCDMSSNFLSKPVDVSKFGVIFAGAQKNVGSAGVTVVIVRDDLLGFALRECPSVLEYKVQAGNSSLYNTPPCFSIYVMGLVLEWIKNNGGAAAMEKLSSIKSQTIYEIIDNSQGFYVFPVEPQNRSKMNIPFRIGNAKGDDALEKRFLDKALELNMLSLKGHRSVGGIRASLYNAVTIEDVQKLAAFMKKFLEMHQL

SEQ ID NO: 142 - protein, 370 aa, synthetic construct
MDAPRQVVNFGPGPAKLPHSVLLEIQKELLDYKGVGISVLEMSHRSSDFAKIINNTENLVRELLAVPDNYKVIFLQGGGCGQFSAVPLNLIGLKAGRCADYVVTGAWSAKAAEEAKKFGTINIVHPKLGSYTKIPDPSTWNLNPDASYVYYCANETVHGVEFDFIPDVKGAVLVCDMSSNFLSKPVDVSKFGVIFAGAQKNVGSAGVTVVIVRDDLLGFALRECPSVLEYKVQAGNSSLYNTPPCFSIYVMGLVLEWIKNNGGAAAMEKLSSIKSQTIYEIIDNSQGFYVCPVEPQNRSKMNIPFRIGNAKGDDALEKRFLDKALELNMLSLKGHRSVGGILASLYNAVTIEDVQKLAAFMKKFLEMHQL

SEQ ID NO: 143 - protein, 370 aa, synthetic construct
MDAPRQVVNFGPGPAKLPHSVLLEIQKELLDYKGVGISVLEMSHRSSDFAKIINNTENLVRELLAVPDNYKVIFLQGGGCGQFSAVPLNLIGLKAGRCADYVVTGAWSAKAAEEAKKFGTINIVHPKLGSYTKIPDPSTWNLNPDASYVYYCANETVHGVEFDFIPDVKGAVLVCDMSSNFLSKPVDVSKFGVIFAGAQKNVGSAGVTVVIDRDDLLGFALRECPSVLEYKVQAGNSSLYNTPPCFSIYVMGLVLEWIKNNGGAAAMEKLSSIKSQTIYEIIDNSQGFYVCPVEPQNRSKMNIPFRIGNAKGDDALEKRFLDKALELNMLSLKGHRSVGGIRASLYNAVTIEDVQKLAAFMKKFLEMHQL

SEQ ID NO: 144 - protein, 370 aa, synthetic construct
MDAPRQVVNFGPGPAKLPHSVLLEIQKELLDYKGVGISVLEMSHRSSDFAKIINNTENLVRELLAVPDNYKVIFLQGGGCGQFSAVPLNLIGLKAGRCADYVVTAAWSAKAAEEAKKFGTINIVHPKLGSYTKIPDPSTWNLNPDASYVYYCANETVHGVEFDFIPDVKGAVLVCDMSSNFLSKPVDVSKFGVIFAGAQKNVGSAGVTVVIVRDDLLGFALRECPSVLEYKVQAGNSSLYNTPPCFSIYVMGLVLEWIKNNGGAAAMEKLSSIKSQTIYEIIDNSQGFYVCPVEPQNRSKMNIPFRIGNAKGDDALEKRFLDKALELNMLSLKGHRSVGGIRASLYNAVTIEDVQKLAAFMKKFLEMHQL

SEQ ID NO: 145 - protein, 370 aa, synthetic construct
MDAPRQVVNFGPGPAKLPHSVLLEIQKELLDYKGVGISVLEMSHRSSDFAKIINNTENLVRELLAVPDNYKVIFLQGGGCGQFSAVPLNLIGLKAGRCADYVVTGAWSAKAAEEAKKFGTINIVHPKLGSYTKIPDPSTWNLNPDASYVYYCANEAVHGVEFDFIPDVKGAVLVCDMSSNFLSKPVDVSKFGVIFAGAQKNVGSAGVTVVIVRDDLLGFALRECPSVLEYKVQAGNSSLYNTPPCFSIYVMGLVLEWIKNNGGAAAMEKLSSIKSQTIYEIIDNSQGFYVCPVEPQNRSKMNIPFRIGNAKGDDALEKRFLDKALELNMLSLKGHRSVGGIRASLYNAVTIEDVQKLAAFMKKFLEMHQL

SEQ ID NO: 146 - protein, 370 aa, synthetic construct
MDAPRQVVNFGPGPAKLPHSVLLEIQKELLDYKGVGISVLEMSHRSSDFAKIINNTENLVRELLAVPDNYKVIFLQGGGCGQFSAVPLNLIGLKAGRCADYVVTGAWSAKAAEEAKKFGTINIVHPKLGSYTKIPDPSTWNLNPDASYVYYCANETVPGVEFDFIPDVKGAVLVCDMSSNFLSKPVDVSKFGVIFAGAQKNVGSAGVTVVIVRDDLLGFALRECPSVLEYKVQAGNSSLYNTPPCFSIYVMGLVLEWIKNNGGAAAMEKLSSIKSQTIYEIIDNSQGFYVCPVEPQNRSKMNIPFRIGNAKGDDALEKRFLDKALELNMLSLKGHRSVGGIRASLYNAVTIEDVQKLAAFMKKFLEMHQL

SEQ ID NO: 147 - protein, 370 aa, synthetic construct
MDAPRQVVNFGPGPAKLPHSVLLEIQKELLDYKGVGISVLEMSHRSSDFAKIINNTENLVRELLAVPDNYKVIFLQGGGCGQFSAVPLNLIGLKAGRCADYVVTGASSAKAAEEAKKFGTINIVHPKLGSYTKIPDPSTWNLNPDASYVYYCANETVHGVEFDFIPDVKGAVLVCDMSSNFLSKPVDVSKFGVIFAGAQKNVGSAGVTVVIVRDDLLGFALRECPSVLEYKVQAGNSSLYNTPPCFSIYVMGLVLEWIKNNGGAAAMEKLSSIKSQTIYEIIDNSQGFYVCPVEPQNRSKMNIPFRIGNAKGDDALEKRFLDKALELNMLSLKGHRSVGGIRASLYNAVTIEDVQKLAAFMKKFLEMHQL

SEQ ID NO: 148 - protein, 370 aa, synthetic construct
MDAPRQVVNFGPGPAKLPHSVLLEIQKELLDYKGVGISVLEMSHRSSDFAKIINNTENLVRELLAVPDNYKVIFLQGGGCGQFSAVPLNLIGLKAGRCADYVVTGAWSAKAAEEAKKFGTINIVHPKLGSYTKIPDPSTWNLNPDASCVYYCANETVHGVEFDFIPDVKGAVLVCDMSSNFLSKPVDVSKFGVIFAGAQKNVGSAGVTVVIVRDDLLGFALRECPSVLEYKVQAGNSSLYNTPPCFSIYVMGLVLEWIKNNGGAAAMEKLSSIKSQTIYEIIDNSQGFYVCPVEPQNRSKMNIPFRIGNAKGDDALEKRFLDKALELNMLSLKGHRSVGGIRASLYNAVTIEDVQKLAAFMKKFLEMHQL

SEQ ID NO: 149 - protein, 370 aa, synthetic construct
MDAPRQVVNFGPGPAKLPHSVLLEIQKELLDYKGVGISVLEMSHRSSDFAKIINNTENLVRELLAVPDNYKVIFLQGGGCGQFSAVPLNLIGLKAGRCADYVVTGAWSAKAAEEAKKFGTINIVHPKLGSYTKIPDPSTWNLNPDASYVYYCANETVHGVEFDFIPDVKGAVLVCDMSSNFLSKPVDVSKFGVIFAGAQKNVGSAGVTVVIVRDDLLGFALRECPSVLEYKVQAGNSSLYNTPPCFSIYVMGLVLEWIKNNGGAAAMEKLSSIKSQTIYEIIDNSQGFYVCPVEPQNRSKMNIPFRIGNAKGDDALEKRFLDKALELNMLSLKGHRSVGGIRASLYNAVTIEDVQKLAAFKKKFLEMHQL

SEQ ID NO: 150 - protein, 370 aa, synthetic construct
MDAPRQVVNFGPGPAKLPHSVLLEIQKELLDYKGVGISVLEMSHMSSDFAKIINNTENLVRELLAVPDNYKVIFLQGGGCGQFSAVPLNLIGLKAGRCADYVVTGAWSAKAAEEAKKFGTINIVHPKLGSYTKIPDPSTWNLNPDASYVYYCANETVHGVEFDFIPDVKGAVLVCDMSSNFLSKPVDVSKFGVIFAGAQKNVGSAGVTVVIVRDDLLGFALRECPSVLEYKVQAGNSSLYNTPPCFSIYVMGLVLEWIKNNGGAAAMEKLSSIKSQTIYEIIDNSQGFYVCPVEPQNRSKMNIPFRIGNAKGDDALEKRFLDKALELNMLSLKGHRSVGGIRASLYNAVTIEDVQKLAAFMKKFLEMHQL

SEQ ID NO: 151 - protein, 370 aa, synthetic construct
MDAPRQVVNFGPGPAKLPHSVLLEIQKELLDYKGVGISVLEMSHRSSDFAKIINNTENLVRELLAVPDNYKVIFLQGGGCGQFSAVPLNLIGLKAGRCADYVVTGAWSAKAAEEAKKFGTINIVHPKLGSYTKIPDPSTWNLNPDASYVYYCANETEHGVEFDFIPDVKGAVLVCDMSSNFLSKPVDVSKFGVIFAGAQKNVGSAGVTVVIVRDDLLGFALRECPSVLEYKVQAGNSSLYNTPPCFSIYVMGLVLEWIKNNGGAAAMEKLSSIKSQTIYEIIDNSQGFYVCPVEPQNRSKMNIPFRIGNAKGDDALEKRFLDKALELNMLSLKGHRSVGGIRASLYNAVTIEDVQKLAAFMKKFLEMHQL

SEQ ID NO: 152 - protein, 370 aa, synthetic construct
MDAPRQVVNFGPGPAKLPHSVLLEIQKELLDYKGVGISVLEMSHRSSDFAKIINNTENLVRELLAVPDNYKVIFLQGGGCGQFSAVPLNLIGLKAGRCADYVVTGAWSAKAAEEAKKFGTINIVHPKLGSYTKIPDPSTWNLNPDASYVYYCANETVHGVEFDFIPDVKGAVLVWDMSSNFLSKPVDVSKFGVIFAGAQKNVGSAGVTVVIVRDDLLGFALRECPSVLEYKVQAGNSSLYNTPPCFSIYVMGLVLEWIKNNGGAAAMEKLSSIKSQTIYEIIDNSQGFYVCPVEPQNRSKMNIPFRIGNAKGDDALEKRFLDKALELNMLSLKGHRSVGGIRASLYNAVTIEDVQKLAAFMKKFLEMHQL

SEQ ID NO: 153 - protein, 370 aa, synthetic construct
MDAPRQVVNFGPGPAKLPHSVLLEIQKELLDYKGVGISVLEMSHRSSDFAKIINNTENLVRELLAVPDNYKVIFLQGGGCGQFSAVPLNLIGLKAGRCADYVVTGAWSAKAAEEAKKFGTINIVHPKLGSYTKIPDPSTWNLNPDASYVYYCANETVHGVEFDFIPDVKGAVLVCDMSSNFLSKPVDVSKFGVIFAGAQKNVGSAGVTVVIVRDDLLGFALRECPSVLEYKVQAGNSSLYNTPPCFSIYVMGLVLEWIKNNGGAAAMEKLSSIKSQTIYEIIDNSQGFNVCPVEPQNRSKMNIPFRIGNAKGDDALEKRFLDKALELNMLSLKGHRSVGGIRASLYNAVTIEDVQKLAAFMKKFLEMHQL

SEQ ID NO: 154 - protein, 370 aa, synthetic construct
MDAPRQVVNFGPGPAKLPHSVLLEIQKELLDYKGVGISVLEMSHRSSDFAKIINNTENLVRELLAVPDNYKVIFLQGGGCGQFSAVPLNLIGLKAGRCADYVVTGAWSAKAAEEAKKFGTINIVHPKLGSYTKIPDPSTWNLNPDASYVYYCANETVHGVEFDFIPDVKGAVLVCDMSSNFLSKPVDVSKFGVIFAGAQKNVGSAGVTVVIVRDDLLGFALRECPSVLEYKVQAGNSSLYNTPPCFSIYVMGLVLEWIKNNGGAAAMEKLSSIKSQTIYEIIDNSQGFYVCPVEPQNRSKMNIPFRIGNAKGDDALEKRFLDKALELNMLSLKGHRSVGGIGASLYNAVTIEDVQKLAAFMKKFLEMHQL

SEQ ID NO: 155 - protein, 370 aa, synthetic construct
MDAPRQVVNFGPGPAKLPHSVLLEIQKELLDYKGVGISVLEMSHRSSDFAKIINNTENLVRELLAVPDNYKVIFLQGGGCGQFSAVPLNLIGLKAGRCADYVVTGAWSAKAAEEAKKFGTINIVHPKLGSYTKIPDPSTWNLNPDASYVYYCANETVHGVEFDFIPDVKGAVLVCDMSSNFLSKPVDVSKFGEIFAGAQKNVGSAGVTVVIVRDDLLGFALRECPSVLEYKVQAGNSSLYNTPPCFSIYVMGLVLEWIKNNGGAAAMEKLSSIKSQTIYEIIDNSQGFYVCPVEPQNRSKMNIPFRIGNAKGDDALEKRFLDKALELNMLSLKGHRSVGGIRASLYNAVTIEDVQKLAAFMKKFLEMHQL

SEQ ID NO: 156 - protein, 370 aa, synthetic construct
MDAPRQVVNFGPGPAKLPHSVLLEIQKELLDYKGVGISVLEMSHRSSDFAKIINNTENLVRELLAVPDNYKVIFLQGGGCGQFSAVPLNLIGLKAGRCADYVVTGAWSAKAAEEAKKFGTINIVHPKLGSYTKIPDPSTWNLNPDASYVYYCANETVHGVEFDFIPDVKGAVLVCDMSSNFLSKPVDVSKFGVIFAGAQKNVGSAGVTVVIVRDDLLGFALRECPSVLEYKVQAGNSSLYNTPPCFSIYVMGLVLEWIKNNGGAAAMEKLSSIKSQTIYEIIDNSQGFYVCPVEPQNRSKMNIPFRIGNAKGDDALEKRFLDKALELNMLSLKGHRSVGGIRASLNNAVTIEDVQKLAAFMKKFLEMHQL

SEQ ID NO: 157 - protein, 370 aa, synthetic construct
MDAPRQVVNFGPGPAKLPHSVLLEIQKELLDYKGVGISVLEMSHRSSDFAKIINNTENLVRELLAVPDNYKVIFLQGGGCGQFSAVPLNLIGLKAGRCADYVVTGAWSAKAAEEAKKFGTINIVHPKLGSYTKIPDPSTWNLNPDASYVYYCANETVHGVEFDFIPDVKGAVLVCDMSSNFLSKPVDVSKFGVIFAGAQKNVGSAGVTVVIVRDDLLGFALRECPSVLEYKVQAGNSSLYNTPPCFSIYVMGLVLEWIKNNGGAAAMEKLSSIKSQTIYEIIDNSQGFYVCPVEPQNRSKMNIPFRIGNAKGDDALEKRFLDKALELNMLSLKGHRSVGRIRASLYNAVTIEDVQKLAAFMKKFLEMHQL

SEQ ID NO: 158 - protein, 370 aa, synthetic construct
MDAPRQVVNFGPGPAKLPHSVLLEIQKELLDYKGVGISVLEMSHRSSDFAKIINNTENLVRELLAVPDNYKVIFLQGGGCGQFSAVPLNLIGLKAGRCPDYVVTGAWSAKAAEEAKKFGTINIVHPKLGSYTKIPDPSTWNLNPDASYVYYCANETVHGVEFDFIPDVKGAVLVCDMSSNFLSKPVDVSKFGVIFAGAQKNVGSAGVTVVIVRDDLLGFALRECPSVLEYKVQAGNSSLYNTPPCFSIYVMGLVLEWIKNNGGAAAMEKLSSIKSQTIYEIIDNSQGFYVCPVEPQNRSKMNIPFRIGNAKGDDALEKRFLDKALELNMLSLKGHRSVGGIRASLYNAVTIEDVQKLAAFMKKFLEMHQL

SEQ ID NO: 159 - protein, 370 aa, synthetic construct
MDAPRQVVNFGPGPAKLPHSVLLEIQKELLDYKGVGISVLEMSLRSSDFAKIINNTENLVRELLAVPDNYKVIFLQGGGCGQFSAVPLNLIGLKAGRCADYVVTGAWSAKAAEEAKKFGTINIVHPKLGSYTKIPDPSTWNLNPDASYVYYCANETVHGVEFDFIPDVKGAVLVCDMSSNFLSKPVDVSKFGVIFAGAQKNVGSAGVTVVIVRDDLLGFALRECPSVLEYKVQAGNSSLYNTPPCFSIYVMGLVLEWIKNNGGAAAMEKLSSIKSQTIYEIIDNSQGFYVCPVEPQNRSKMNIPFRIGNAKGDDALEKRFLDKALELNMLSLKGHRSVGGIRASLYNAVTIEDVQKLAAFMKKFLEMHQL

SEQ ID NO: 160 - protein, 370 aa, synthetic construct
MDAPRQVVNFGPGPAKLPHSVLLEIQKELLDYKGVGISVLEMSHRSSDFAKIINNTENLVRELLAVPDNYKVIFLQGGGCGQFSAVPLNLIGLKAGRCADYVVTGAWSAKAAEEAKKFGTINIVHPKLGSYTKIPDPSTWNLNPDASYVYYCANGTVHGVEFDFIPDVKGAVLVCDMSSNFLSKPVDVSKFGVIFAGAQKNVGSAGVTVVIVRDDLLGFALRECPSVLEYKVQAGNSSLYNTPPCFSIYVMGLVLEWIKNNGGAAAMEKLSSIKSQTIYEIIDNSQGFYVCPVEPQNRSKMNIPFRIGNAKGDDALEKRFLDKALELNMLSLKGHRSVGGIRASLYNAVTIEDVQKLAAFMKKFLEMHQL

SEQ ID NO: 161 - protein, 370 aa, synthetic construct
MDAPRQVVNFGPGPAKLPHSVLLEIQKELLDYKGVGISVLEMSHRSSDFAKIINNTENLVRELLAVPDNYKVIFLQGGGCGQFSAVPLNLIGLKAGRCADYVVTGAWSAKAAEEAKKFGTINIVHPKLGSYTKIPDPSTWNLNPDASYVYYCANETVHGVEFDFIPDVKGAVLVCDMSSNFLSKPVDVSKFGVIFAGAQKNDGSAGVTVVIVRDDLLGFALRECPSVLEYKVQAGNSSLYNTPPCFSIYVMGLVLEWIKNNGGAAAMEKLSSIKSQTIYEIIDNSQGFYVCPVEPQNRSKMNIPFRIGNAKGDDALEKRFLDKALELNMLSLKGHRSVGGIRASLYNAVTIEDVQKLAAFMKKFLEMHQL

SEQ ID NO: 162 - protein, 370 aa, synthetic construct
MDAPRQVVNFGPGPAKLPHSVLLEIQKELLDYKGVGIIVLEMSHRSSDFAKIINNTENLVRELLAVPDNYKVIFLQGGGCGQFSAVPLNLIGLKAGRCADYVVTGAWSAKAAEEAKKFGTINIVHPKLGSYTKIPDPSTWNLNPDASYVYYCANETVHGVEFDFIPDVKGAVLVCDMSSNFLSKPVDVSKFGVIFAGAQKNVGSAGVTVVIVRDDLLGFALRECPSVLEYKVQAGNSSLYNTPPCFSIYVMGLVLEWIKNNGGAAAMEKLSSIKSQTIYEIIDNSQGFYVCPVEPQNRSKMNIPFRIGNAKGDDALEKRFLDKALELNMLSLKGHRSVGGIRASLYNAVTIEDVQKLAAFMKKFLEMHQL

SEQ ID NO: 163 - protein, 370 aa, synthetic construct
MDAPRQVVNFGPGPAKLPHSVLLEIQKELLDYKGVGISVLEMSHRSSDFAKIINNTENLVRELLAVPDNYKVIFLQGGGCGQFSAVPLNLIGLKAGRCADYVVTGAWSAKAAEEAKKFGTINIVHPKLGSYTKIPDPSTWNLNPDASYVYYCANETVHGVEFDFIPDVKGAVLVCDMSSNFLSKPVDVSKFGVNFAGAQKNVGSAGVTVVIVRDDLLGFALRECPSVLEYKVQAGNSSLYNTPPCFSIYVMGLVLEWIKNNGGAAAMEKLSSIKSQTIYEIIDNSQGFYVCPVEPQNRSKMNIPFRIGNAKGDDALEKRFLDKALELNMLSLKGHRSVGGIRASLYNAVTIEDVQKLAAFMKKFLEMHQL

SEQ ID NO: 164 - protein, 370 aa, synthetic construct
MDAPRQVVNFGPGPAKLPHSVLLEIQKELLDYKGVGISVLEMSHRSSDFAKIINNTENLVRELLAVPDNNKVIFLQGGGCGQFSAVPLNLIGLKAGRCADYVVTGAWSAKAAEEAKKFGTINIVHPKLGSYTKIPDPSTWNLNPDASYVYYCANETVHGVEFDFIPDVKGAVLVCDMSSNFLSKPVDVSKFGVIFAGAQKNVGSAGVTVVIVRDDLLGFALRECPSVLEYKVQAGNSSLYNTPPCFSIYVMGLVLEWIKNNGGAAAMEKLSSIKSQTIYEIIDNSQGFYVCPVEPQNRSKMNIPFRIGNAKGDDALEKRFLDKALELNMLSLKGHRSVGGIRASLYNAVTIEDVQKLAAFMKKFLEMHQL

SEQ ID NO: 165 - protein, 370 aa, synthetic construct
MDAPRQVVNFGPGPAKLPHSVLLEIQKELLDYKGVGISVLEMSHRSSDFAKIINNTENLVRELLAVPDNYKVIFLQGGGCGQFSAVPLNLIGLKAGRCADYVVTGAWSAKAAEEAKKFGTINIVHPKLGSYTKIPDPSTWNLNPDASYVYYCANETVHGVEFDFIPDVKGAVLVCDMFSNFLSKPVDVSKFGVIFAGAQKNVGSAGVTVVIVRDDLLGFALRECPSVLEYKVQAGNSSLYNTPPCFSIYVMGLVLEWIKNNGGAAAMEKLSSIKSQTIYEIIDNSQGFYVCPVEPQNRSKMNIPFRIGNAKGDDALEKRFLDKALELNMLSLKGHRSVGGIRASLYNAVTIEDVQKLAAFMKKFLEMHQL

SEQ ID NO: 166 - protein, 370 aa, synthetic construct
MDAPRQVVNFGPGPAKLPHSVLLEIQKELLDYKGVGISVLEMSHRSSDFAKIINNTENLVRELLAVPDNYKVIFLQGGGCGQFSAVPLNLIGLKAGRCADYGVTGAWSAKAAEEAKKFGTINIVHPKLGSYTKIPDPSTWNLNPDASYVYYCANETVHGVEFDFIPDVKGAVLVCDMSSNFLSKPVDVSKFGVIFAGAQKNVGSAGVTVVIVRDDLLGFALRECPSVLEYKVQAGNSSLYNTPPCFSIYVMGLVLEWIKNNGGAAAMEKLSSIKSQTIYEIIDNSQGFYVCPVEPQNRSKMNIPFRIGNAKGDDALEKRFLDKALELNMLSLKGHRSVGGIRASLYNAVTIEDVQKLAAFMKKFLEMHQL

SEQ ID NO: 167 - protein, 370 aa, synthetic construct
MDAPRQVVNFGPGPAKLPHSVLLEIQKELLDYKGVGISVLEMSHRSSDFAKIINNTENLVRELLAVPDNYKVIFLQGGGCGQFSAVPLNLIGLKAGRCADYVVTGAWSAKAAEEAKKFGTINIVHPKLGSYTKIPDPSTWNLNPDASYVYYCANETVHGVEFDFIPDVKGAVLVCDMYSNFLSKPVDVSKFGVIFAGAQKNVGSAGVTVVIVRDDLLGFALRECPSVLEYKVQAGNSSLYNTPPCFSIYVMGLVLEWIKNNGGAAAMEKLSSIKSQTIYEIIDNSQGFYVCPVEPQNRSKMNIPFRIGNAKGDDALEKRFLDKALELNMLSLKGHRSVGGIRASLYNAVTIEDVQKLAAFMKKFLEMHQL

SEQ ID NO: 168 - protein, 370 aa, synthetic construct
MDAPRQVVNFGPGPAKLPHSVLLEIQKELLDYKGVGISVLEMSHGSSDFAKIINNTENLVRELLAVPDNYKVIFLQGGGCGQFSAVPLNLIGLKAGRCADYVVTGAWSAKAAEEAKKFGTINIVHPKLGSYTKIPDPSTWNLNPDASYVYYCANETVHGVEFDFIPDVKGAVLVCDMSSNFLSKPVDVSKFGVIFAGAQKNVGSAGVTVVIVRDDLLGFALRECPSVLEYKVQAGNSSLYNTPPCFSIYVMGLVLEWIKNNGGAAAMEKLSSIKSQTIYEIIDNSQGFYVCPVEPQNRSKMNIPFRIGNAKGDDALEKRFLDKALELNMLSLKGHRSVGGIRASLYNAVTIEDVQKLAAFMKKFLEMHQL

SEQ ID NO: 169 - protein, 370 aa, synthetic construct
MDAPRQVVNFGPGPAKLPHSVLLEIQKELLDYKGVGISVLEMSHRSSDFAKIINNTENLVRELLAVPDNYKGIFLQGGGCGQFSAVPLNLIGLKAGRCADYVVTGAWSAKAAEEAKKFGTINIVHPKLGSYTKIPDPSTWNLNPDASYVYYCANETVHGVEFDFIPDVKGAVLVCDMSSNFLSKPVDVSKFGVIFAGAQKNVGSAGVTVVIVRDDLLGFALRECPSVLEYKVQAGNSSLYNTPPCFSIYVMGLVLEWIKNNGGAAAMEKLSSIKSQTIYEIIDNSQGFYVCPVEPQNRSKMNIPFRIGNAKGDDALEKRFLDKALELNMLSLKGHRSVGGIRASLYNAVTIEDVQKLAAFMKKFLEMHQL

SEQ ID NO: 170 - protein, 370 aa, synthetic construct
MDAPRQVVNFGPGPAKLPHSVLLEIQKELLDYKGVGISVLEMSHRSSDFAKIINNTENLVRELLAVPDNYKVIFLQGGGCGQFSAVPLILIGLKAGRCADYVVTGAWSAKAAEEAKKFGTINIVHPKLGSYTKIPDPSTWNLNPDASYVYYCANETVHGVEFDFIPDVKGAVLVCDMSSNFLSKPVDVSKFGVIFAGAQKNVGSAGVTVVIVRDDLLGFALRECPSVLEYKVQAGNSSLYNTPPCFSIYVMGLVLEWIKNNGGAAAMEKLSSIKSQTIYEIIDNSQGFYVCPVEPQNRSKMNIPFRIGNAKGDDALEKRFLDKALELNMLSLKGHRSVGGIRASLYNAVTIEDVQKLAAFMKKFLEMHQL

SEQ ID NO: 171 - protein, 370 aa, synthetic construct
MDAPRQVVNFGPGPAKLPHSVLLEIQKELLDYKGVGISVLEMSHRSSDFAKIINNTENLVRELLAVPDNYKVIFLQGGGCGQFSAVPLNLIGLKAGRCADCVVTGAWSAKAAEEAKKFGTINIVHPKLGSYTKIPDPSTWNLNPDASYVYYCANETVHGVEFDFIPDVKGAVLVCDMSSNFLSKPVDVSKFGVIFAGAQKNVGSAGVTVVIVRDDLLGFALRECPSVLEYKVQAGNSSLYNTPPCFSIYVMGLVLEWIKNNGGAAAMEKLSSIKSQTIYEIIDNSQGFYVCPVEPQNRSKMNIPFRIGNAKGDDALEKRFLDKALELNMLSLKGHRSVGGIRASLYNAVTIEDVQKLAAFMKKFLEMHQL

SEQ ID NO: 172 - protein, 370 aa, synthetic construct
MDAPRQVVNFGPGPAKLPHSVLLEIQKELLDYKGVGISVLEMSHRSSDFAKIINNTENLVRELLAVPDNYKVIFLQGGGCGQFSAVPLNLIGLKAGRCADYVVTGAWSAKAAEEAKKFGTINIVHPKLGSYTKIPDPSTWNLNPDASYVYYCANETVHGVEFDFIPDVKGAVLVCDMSSNFLSKPVDVSKFGVIFAGAQKNVGSAGVTVVIVRDDLLGFALRECPSVLEYKVQAGNSSLYNTPPCFSIYVMGLVLEWIKNNGGAAAMEKLSSIKSQTIYEIIDNSQGFHVCPVEPQNRSKMNIPFRIGNAKGDDALEKRFLDKALELNMLSLKGHRSVGGIRASLYNAVTIEDVQKLAAFMKKFLEMHQL

SEQ ID NO: 173 - protein, 370 aa, synthetic construct
MDAPRQVVNFGPGPAKLPHSVLLEIQKELLDYKGVGISVLEMSHKSSDFAKIINNTENLVRELLAVPDNYKVIFLQGGGCGQFSAVPLNLIGLKAGRCADYVVTGAWSAKAAEEAKKFGTINIVHPKLGSYTKIPDPSTWNLNPDASYVYYCANETVHGVEFDFIPDVKGAVLVCDMSSNFLSKPVDVSKFGVIFAGAQKNVGSAGVTVVIVRDDLLGFALRECPSVLEYKVQAGNSSLYNTPPCFSIYVMGLVLEWIKNNGGAAAMEKLSSIKSQTIYEIIDNSQGFYVCPVEPQNRSKMNIPFRIGNAKGDDALEKRFLDKALELNMLSLKGHRSVGGIRASLYNAVTIEDVQKLAAFMKKFLEMHQL

SEQ ID NO: 174 - protein, 370 aa, synthetic construct
MDAPRQVVNFGPGPAKLPHSVLLEIQKELLDYKGVGISVLEMSHRSSDFAKIINNTENLVRELLAVPDNYKVIFLQGGGCGQFSAVPLNLIGLKAGRCADYVVTGAWSAKAAEEAKKFGTINIVHPKLGSYTKIPDPSTWNLNPDASYVYYCANETVHGVEFDFIPDVKGAVLVCDMSSNFLSKPVDVSKFGVIFAGAQKNVGSAGVTVVIVRDDLLGFALRECPSVLEYKVQAGNSSLYITPPCFSIYVMGLVLEWIKNNGGAAAMEKLSSIKSQTIYEIIDNSQGFYVCPVEPQNRSKMNIPFRIGNAKGDDALEKRFLDKALELNMLSLKGHRSVGGIRASLYNAVTIEDVQKLAAFMKKFLEMHQL

SEQ ID NO: 175 - protein, 370 aa, synthetic construct
MDAPRQVVNFGPGPAKLPHSVLLEIQKELLDYKGVGISVLEMSHTSSDFAKIINNTENLVRELLAVPDNYKVIFLQGGGCGQFSAVPLNLIGLKAGRCADYVVTGAWSAKAAEEAKKFGTINIVHPKLGSYTKIPDPSTWNLNPDASYVYYCANETVHGVEFDFIPDVKGAVLVCDMSSNFLSKPVDVSKFGVIFAGAQKNVGSAGVTVVIVRDDLLGFALRECPSVLEYKVQAGNSSLYNTPPCFSIYVMGLVLEWIKNNGGAAAMEKLSSIKSQTIYEIIDNSQGFYVCPVEPQNRSKMNIPFRIGNAKGDDALEKRFLDKALELNMLSLKGHRSVGGIRASLYNAVTIEDVQKLAAFMKKFLEMHQL

SEQ ID NO: 176 - protein, 370 aa, synthetic construct
MDAPRQVVNFGPGPAKLPHSVLLEIQKELLDYKGVGISVLEMSHRSSDFAKIINNTENLVRELLAVPDNSKVIFLQGGGCGQFSAVPLNLIGLKAGRCADYVVTGAWSAKAAEEAKKFGTINIVHPKLGSYTKIPDPSTWNLNPDASYVYYCANETVHGVEFDFIPDVKGAVLVCDMSSNFLSKPVDVSKFGVIFAGAQKNVGSAGVTVVIVRDDLLGFALRECPSVLEYKVQAGNSSLYNTPPCFSIYVMGLVLEWIKNNGGAAAMEKLSSIKSQTIYEIIDNSQGFYVCPVEPQNRSKMNIPFRIGNAKGDDALEKRFLDKALELNMLSLKGHRSVGGIRASLYNAVTIEDVQKLAAFMKKFLEMHQL

SEQ ID NO: 177 - protein, 370 aa, synthetic construct
MDAPRQVVNFGPGPAKLPHSVLLEIQKELLDYKGVGISVLEMSHRSSDFAKIINNTENLVRELLAVPDNYKVIFLQGGGCGQFSAVPLNLIGLKAGRCADYVVTGAWSAKAAEEAKKFGTINIVHPKLGSYTKIPDPSTWNLNPDASYVYYCANETVHGVEFDFIPDVKGAVLVCDMSSNFLSKPVDVSKFGVIFAGAQKNVGSAGVTVVIVRDDLLGFALRECPSVLEYKVQAGNSSLYNTPPCFSIYVMGLVLEWIKNNGGAAAMEKLSSIKSQTIYEIIDNSQGFYVCPVEPQNRSKMNIPFRIGNAKGDDALEKRFLDKALELNMLSLKGHRSVGGIRASLSNAVTIEDVQKLAAFMKKFLEMHQL

SEQ ID NO: 178 - protein, 370 aa, synthetic construct
MDAPRQVVNFGPGPAKLPHSVLLEIQKELLDYKGVGISVLEMSHRSSDFAKIINNTENLVRELLAVPDNYKVIFLQGGGCGQFSAVPLNLSGLKAGRCADYVVTGAWSAKAAEEAKKFGTINIVHPKLGSYTKIPDPSTWNLNPDASYVYYCANETVHGVEFDFIPDVKGAVLVCDMSSNFLSKPVDVSKFGVIFAGAQKNVGSAGVTVVIVRDDLLGFALRECPSVLEYKVQAGNSSLYNTPPCFSIYVMGLVLEWIKNNGGAAAMEKLSSIKSQTIYEIIDNSQGFYVCPVEPQNRSKMNIPFRIGNAKGDDALEKRFLDKALELNMLSLKGHRSVGGIRASLYNAVTIEDVQKLAAFMKKFLEMHQL

SEQ ID NO: 179 - protein, 370 aa, synthetic construct
MDAPRQVVNFGPGPAKLPHSVLLEIQKELLDYKGVGISVLEMSHRSSDFAKIINNTENLVRELLAVPDNYKVIFLQGGGCGQFSAVPLNLIGLKAGRCADYVGTGAWSAKAAEEAKKFGTINIVHPKLGSYTKIPDPSTWNLNPDASYVYYCANETVHGVEFDFIPDVKGAVLVCDMSSNFLSKPVDVSKFGVIFAGAQKNVGSAGVTVVIVRDDLLGFALRECPSVLEYKVQAGNSSLYNTPPCFSIYVMGLVLEWIKNNGGAAAMEKLSSIKSQTIYEIIDNSQGFYVCPVEPQNRSKMNIPFRIGNAKGDDALEKRFLDKALELNMLSLKGHRSVGGIRASLYNAVTIEDVQKLAAFMKKFLEMHQL

SEQ ID NO: 180 - protein, 370 aa, synthetic construct
MDAPRQVVNSGPGPAKLPHSVLLEIQKELLDYKGVGISVLEMSHRSSDFAKIINNTENLVRELLAVPDNYKVIFLQGGGCGQFSAVPLNLIGLKAGRCADYVVTGAWSAKAAEEAKKFGTINIVHPKLGSYTKIPDPSTWNLNPDASYVYYCANETVHGVEFDFIPDVKGAVLVCDMSSNFLSKPVDVSKFGVIFAGAQKNVGSAGVTVVIVRDDLLGFALRECPSVLEYKVQAGNSSLYNTPPCFSIYVMGLVLEWIKNNGGAAAMEKLSSIKSQTIYEIIDNSQGFYVCPVEPQNRSKMNIPFRIGNAKGDDALEKRFLDKALELNMLSLKGHRSVGGIRASLYNAVTIEDVQKLAAFMKKFLEMHQL

SEQ ID NO: 181 - protein, 370 aa, synthetic construct
MDAPRQVVNFGPGPAKLPHSVLLEIQKELLDYKGVGISVLEMSHRSSDFAKIINNTENLVRELLAVPDNYKVIFLQGGGCGQFSAVPLNLIGLKAGRCADYVVTGAWSAKAAEEAKKFGTINIVHPKLGSYTKIPDPSTWNLNPDASYVYYCANETVHGVEFDFIPDVKGAVLVCDMSSNFLSKPVDVSKFGVIFAGAQKNVGSAGVTVVIVRDDLLGFALRECPSVLEYKVQAGNSSLYNTPPCFSIYVMGLVLEWIKNNGGAAAMEKLSSIKSQTIYEIIDNSQGFYVCPVEPQNRSKMNIPFRIGNAKGDDALEKRFLDKALELNMLSLKWHRSVGGIRASLYNAVTIEDVQKLAAFMKKFLEMHQL

SEQ ID NO: 182 - protein, 370 aa, synthetic construct
MDAPRQVVNFGPGPAKLPHSVLLEIQKELLDYKGVGISVLEMSHRSSDFAKIINNTENLVRELLAVPDNYKVIFLQGGGCGQFSAVPLNLIGLKAGRCADYVVTGAWSAKAAEEAKKFGTINIVHPKLGSYTKIPDPSTWNLNPDASYVYYCANETVHGVEFDFIPDVKGAVLVCDMSSNFLSKPVDVSKFGVIFAGAQKNVGSAGVTVVIVRDDLLGFALRECPSVLEYKVQAGNSSLYNTPPCFSIYVMGLVLEWIKNNGGAAAMEKLSSIKSQTIYEIIDNSQGFYVCPVEPQNRSKMNIPFRIGNAKGDDALEKRFLDKALELNMLSLKGLRSVGGIRASLYNAVTIEDVQKLAAFMKKFLEMHQL

SEQ ID NO: 183 - protein, 370 aa, synthetic construct
MDAPRQVVNFGPGPAKLPHSVLLEIQKELLDYKGVGISVLEMSHRSSDFAKIINNTENLVRELLAVPDNYKVIFLQGGGCGQFSAVPLNLIGLKAGRCADYVVTGAWSAKAAEEAKKFGTINIVHPKLGSYTKIPDPSTWNLNPDASYVYYCANETVHGVEFDFIPDVKGAVLVCDMSSNFLSKPVDVSKFGVIFAGAQKNVGSAGVTVVIVGDDLLGFALRECPSVLEYKVQAGNSSLYNTPPCFSIYVMGLVLEWIKNNGGAAAMEKLSSIKSQTIYEIIDNSQGFYVCPVEPQNRSKMNIPFRIGNAKGDDALEKRFLDKALELNMLSLKGHRSVGGIRASLYNAVTIEDVQKLAAFMKKFLEMHQL

SEQ ID NO: 184 - protein, 370 aa, synthetic construct
MDAPRQVVNFGPGPAKLPHSVLLEIQKELLDYKGVGISVLEMSHRSSDFAKIINNTENLVRELLAVPDNYKVIFLQGGGCGQFSAVPLNLIGLKAGRCADYVVTGAWSAKAAEEAKKFGTINIVHPKLGSYTKIPDPSTWNLNPDASYVYYCANETVHGVEFDFIPDVKGAVLVCDMSSNFLSKPVDVSKFGVIFAGAQKNVGSAGVTVVIVRDDLLGFALRECPSVLEYKVQAGNSSLYNTPPCFSIYVMGLVLEWIKNNGGAAAMEKLSSIKSQTSYEIIDNSQGFYVCPVEPQNRSKMNIPFRIGNAKGDDALEKRFLDKALELNMLSLKGHRSVGGIRASLYNAVTIEDVQKLAAFMKKFLEMHQL

SEQ ID NO: 185 - protein, 370 aa, synthetic construct
MDAPRQVVNFGPGPAKLPHSVLLEIQKELLDYKGVGISVLEMSHRSSDFAKIINNTENLVRELLAVPDNYKVIFLQGGGCGQFSAVPLNLIGLKAGRCADYVVTGAWSAKAAEEAKKFGTINIVHPKLGSYTKIPDPSTWNLNPDASYVYYCANETVHGVEFDFIPDVKGAVLVRDMSSNFLSKPVDVSKFGVIFAGAQKNVGSAGVTVVIVRDDLLGFALRECPSVLEYKVQAGNSSLYNTPPCFSIYVMGLVLEWIKNNGGAAAMEKLSSIKSQTIYEIIDNSQGFYVCPVEPQNRSKMNIPFRIGNAKGDDALEKRFLDKALELNMLSLKGHRSVGGIRASLYNAVTIEDVQKLAAFMKKFLEMHQL

SEQ ID NO: 186 - protein, 370 aa, synthetic construct
MDAPRQVVNFGPGPAKLPHSVLLEIQKELLDYKGVGISVLEMSHRSSDFAKIINNTENLVRELLAVPDNYKVIFLQGGGCGQFSAVPLNLIGLKAGRCADYVVTGAWSAKAAEEAKKFGTINIVHPKLGSYTKIPDPSTWNLNPDASYEYYCANETVHGVEFDFIPDVKGAVLVCDMSSNFLSKPVDVSKFGVIFAGAQKNVGSAGVTVVIVRDDLLGFALRECPSVLEYKVQAGNSSLYNTPPCFSIYVMGLVLEWIKNNGGAAAMEKLSSIKSQTIYEIIDNSQGFYVCPVEPQNRSKMNIPFRIGNAKGDDALEKRFLDKALELNMLSLKGHRSVGGIRASLYNAVTIEDVQKLAAFMKKFLEMHQL

SEQ ID NO: 187 - protein, 370 aa, synthetic construct
MDAPRQVVNFGPGPAKLPHSVLLEIQKELLDYKGVGISVLEMSHRSSDFAKIINNTENLVRELLAVPDNYKVIFLQGGGCGQFSAVPLNLIGLKAGRCADYVVTGAWSAKAAEEAKKFGTINIVHPKLGSYTKIPDPSTWNLNPDASYVYNCANETVHGVEFDFIPDVKGAVLVCDMSSNFLSKPVDVSKFGVIFAGAQKNVGSAGVTVVIVRDDLLGFALRECPSVLEYKVQAGNSSLYNTPPCFSIYVMGLVLEWIKNNGGAAAMEKLSSIKSQTIYEIIDNSQGFYVCPVEPQNRSKMNIPFRIGNAKGDDALEKRFLDKALELNMLSLKGHRSVGGIRASLYNAVTIEDVQKLAAFMKKFLEMHQL

SEQ ID NO: 188 - protein, 370 aa, synthetic construct
MDAPRQVVNFGPGPAKLPHSVLLEIQKELLDYKGVGISVLEMSHRSSDFAKIINNTENLVRELLAVPDNYKVIFLQGGGCGQFSAVPLDLIGLKAGRCADYVVTGAWSAKAAEEAKKFGTINIVHPKLGSYTKIPDPSTWNLNPDASYVYYCANETVHGVEFDFIPDVKGAVLVCDMSSNFLSKPVDVSKFGVIFAGAQKNVGSAGVTVVIVRDDLLGFALRECPSVLEYKVQAGNSSLYNTPPCFSIYVMGLVLEWIKNNGGAAAMEKLSSIKSQTIYEIIDNSQGFYVCPVEPQNRSKMNIPFRIGNAKGDDALEKRFLDKALELNMLSLKGHRSVGGIRASLYNAVTIEDVQKLAAFMKKFLEMHQL

SEQ ID NO: 189 - protein, 370 aa, synthetic construct
MDAPRQVVNFGPGPAKLPHSVLLEIQKELLDYKGVGISVLEMSHRSSDFAKIINNTENLVRELLAVPDNYKVIFLQGGGCGQFSAVPLNLIGLKAGRCADYVVTGAWSAKAAEEAKKFGTINIVHPKLGSYTKIPDPSTWNLNPDASYVYYCANETVHGVEFDFIPDVKGAVLVCDMSSNFLSKPVDVSKFGVIFAGAQKNVGSAGVTVVIVRDDLLGFALRECPSVLEYKVQAGNSSLYNTPPCFSIYVMGLVLEWIKNNGGAAAMEKLSSIKSQTIYEINDNSQGFYVCPVEPQNRSKMNIPFRIGNAKGDDALEKRFLDKALELNMLSLKGHRSVGGIRASLYNAVTIEDVQKLAAFMKKFLEMHQL

SEQ ID NO: 190 - protein, 370 aa, synthetic construct
MDAPRQVVNFGPGPAKLPHSVLLEIQKELLDYKGVGISVLEMSHRSSDFAKIINNTENLVRELLAVPDNYKVIFLQGGGCGQFSAVPLNLIGLKAGRCADYVVTGAWSAKAAEEAKKFGTINIVHPKLGSYTKIPDPSTWNLNPDASYVYYCANETVHGVEFDFIPDVKGAVLVCDMSSNFLSKPVDVSKFGVIFAGAQKNVGSAGVTVVIVRDDLLGFALRECPSVLEYKVQAGNSSLYNTPPCFSIYVMGLVLEWIKNNGGAAAMEKLSSIKSQTIYEIIDNSQGFYVCPVEPQNRSKMHIPFRIGNAKGDDALEKRFLDKALELNMLSLKGHRSVGGIRASLYNAVTIEDVQKLAAFMKKFLEMHQL

SEQ ID NO: 191 - protein, 370 aa, synthetic construct
MDAPRQVVNFGPGPAKLPHSVLLEIQKELLDYKGVGISVLEMSHRSSDFAKIINNTENLVRELLAVPDNYKVIFLQGGGCGQFSAVPLNLIGLKAGRCADYVVTGAWSAKAAEEAKKFGTINIVHPKLGSYTKIPDPSTWNLNPDASYVYYCANETVHGVEFDFIPDVKGAVLVCDMSSNFLSKPVDVSKFGVIFAGAQKNVGSAGVTVVIVRDDLLGFALRECPSVLEYKVQAGNSSLYNTPPCFSIYVMGLVLEWIKNNGGAAAMEKLSSIKSQTIYEIIDNSQGFYVRPVEPQNRSKMNIPFRIGNAKGDDALEKRFLDKALELNMLSLKGHRSVGGIRASLYNAVTIEDVQKLAAFMKKFLEMHQL

SEQ ID NO: 192 - protein, 370 aa, synthetic construct
MDAPRQVVNFGPGPAKLPHSVLLEIQKELLDYKGVGISVLEMSHRSSDFAKIINNTENLVRELLAVPDNYKVIFLQGGGCGQFSAVPLNLIGLKAGRCADYVVTGAWSAKAAEEAKKFGTINIVHPKLGSYTKIPDPSTWNLNPDASYVYYCANETVHGVEFDFIPDVKGAVLVCDMSSNFLSKPVDVSKFGVIFAGAEKNVGSAGVTVVIVRDDLLGFALRECPSVLEYKVQAGNSSLYNTPPCFSIYVMGLVLEWIKNNGGAAAMEKLSSIKSQTIYEIIDNSQGFYVCPVEPQNRSKMNIPFRIGNAKGDDALEKRFLDKALELNMLSLKGHRSVGGIRASLYNAVTIEDVQKLAAFMKKFLEMHQL

SEQ ID NO: 193 - protein, 370 aa, synthetic construct
MDAPRQVVNFGPGPAKLPHSVLLEIQKELLDYKGVGISVLEMSHRSSDFAKIINNTENLVRELLAVPDNYKVIFLQGGGCGQFSAVPLNLIGLKAGRCADYVVTGAWSAKAAEEAKKFGTINIVHPKLGSYTKIPDPSTWNLNPDASYVYYCANETVHGVEFDFIPDVKGAVLVCDMSPNFLSKPVDVSKFGVIFAGAQKNVGSAGVTVVIVRDDLLGFALRECPSVLEYKVQAGNSSLYNTPPCFSIYVMGLVLEWIKNNGGAAAMEKLSSIKSQTIYEIIDNSQGFYVCPVEPQNRSKMNIPFRIGNAKGDDALEKRFLDKALELNMLSLKGHRSVGGIRASLYNAVTIEDVQKLAAFMKKFLEMHQL

SEQ ID NO: 194 - protein, 370 aa, synthetic construct
MDAPRQVVNFGPGPAKLPHSVLLEIQKELLDYKGVGISVLEMSHRSSDFAKIINNTENLVRELLAVPDNYKVIFLQGGGCGQFSAVPLNLIGLKAGRCADYVVTGAWSAKAAEEAKKFGTINIVHPKLGSYTKIPDPSTWNLNPDASYVYYCANETVHGVEFDFIPDVKGAVLVCDMSSNFLSKPVDVSKFGVIFAGAQKNVGSAGVTVVIVRDDLLGFALRECPSVLEYKVQAGNSSLYNTPPCFSIYVMGLVLEWIKNNGGAAAMEKLSSIKSQTIYEIIDNSQGFYVCPVEPQNRSKMNIPFRIGNAKGDDALEKRFLDKALELNMLSLKGHRSVGDIRASLYNAVTIEDVQKLAAFMKKFLEMHQL

SEQ ID NO: 195 - protein, 370 aa, synthetic construct
MDAPRQVVNFGPGPAKLPHSVLLEIQKELLDYKGVGISVLEMSHRSSDFAKIINNTENLVRELLAVPDNYKVIFLQGGGCGQFSAVPLNLIGLKAGRCADYVVTGAWSAKAAEEAKKFGTINIVHPKLGSYTKIPDPSTWNLNPDASYVYYCANETVHGVEFDFIPDVKGAVLVCDMSSNFLSKPVDVSKFGVIFAGAQKNVGSAGVTVVIVRDDLLGFALRECPSVLEYKVQAGNSSLYNTPPCFSIYVMGLVLEWIKNNGGAAAMEKLSSIKSQTIYEIIDNSQGFYVCPVEPQNRSKMNIPFRNGNAKGDDALEKRFLDKALELNMLSLKGHRSVGGIRASLYNAVTIEDVQKLAAFMKKFLEMHQL

SEQ ID NO: 196 - protein, 370 aa, synthetic construct
MDAPRQVVNFGPGPAKLPHSVLLEIQKELLDYKGVGISVLEMSHRSSDFAKIINNTENLVRELLAVPDNYKVIFLQGGGCGQFSAVPLNLIGLKAGRCADYVVTGAWSAKAAEETKKFGTINIVHPKLGSYTKIPDPSTWNLNPDASYVYYCANETVHGVEFDFIPDVKGAVLVCDMSSNFLSKPVDVSKFGVIFAGAQKNVGSAGVTVVIVRDDLLGFALRECPSVLEYKVQAGNSSLYNTPPCFSIYVMGLVLEWIKNNGGAAAMEKLSSIKSQTIYEIIDNSQGFYVCPVEPQNRSKMNIPFRIGNAKGDDALEKRFLDKALELNMLSLKGHRSVGGIRASLYNAVTIEDVQKLAAFMKKFLEMHQL

SEQ ID NO: 197 - protein, 370 aa, synthetic construct
MDAPRQVVNFGPGPAKLPHSVLLEIQKELLDYKGVGISVLEMSHRSSDFAKIINNTENLVRELLAVPDNYKVIFLQGGGCGQFSAVPLNLTGLKAGRCADYVVTGAWSAKAAEEAKKFGTINIVHPKLGSYTKIPDPSTWNLNPDASYVYYCANETVHGVEFDFIPDVKGAVLVCDMSSNFLSKPVDVSKFGVIFAGAQKNVGSAGVTVVIVRDDLLGFALRECPSVLEYKVQAGNSSLYNTPPCFSIYVMGLVLEWIKNNGGAAAMEKLSSIKSQTIYEIIDNSQGFYVCPVEPQNRSKMNIPFRIGNAKGDDALEKRFLDKALELNMLSLKGHRSVGGIRASLYNAVTIEDVQKLAAFMKKFLEMHQL

SEQ ID NO: 198 - protein, 370 aa, synthetic construct
MDAPRQVVNFGPGPAKLPHSVLLEIQKELLDYKGVGISVLEMSHRSSDFAKIINNTENLVRELLAVPDNYKVIFLQGGGCGQFSAVPLNLIGLKAGRCADYVVTGAWSAKAAEEAKKFGTINIVHPKLGSYTKIPDPSTWNLNPDASYVYYCANETVHGVEFDFIPDVKGAVLVCDMSSNFLSKPVDVSKFGVIFAGAQKNVGSAGVTVVIVRDDLLGFALRECPSVLEYKVQAGNSSLYNTHPCFSIYVMGLVLEWIKNNGGAAAMEKLSSIKSQTIYEIIDNSQGFYVCPVEPQNRSKMNIPFRIGNAKGDDALEKRFLDKALELNMLSLKGHRSVGGIRASLYNAVTIEDVQKLAAFMKKFLEMHQL

SEQ ID NO: 199 - protein, 370 aa, synthetic construct
MDAPRQVVNFGPGPAKLPHSVLLEIQKELLDYKGVGISVLEMSHRSSDFAKIINNTENLVRELLAVPDNYKEIFLQGGGCGQFSAVPLNLIGLKAGRCADYVVTGAWSAKAAEEAKKFGTINIVHPKLGSYTKIPDPSTWNLNPDASYVYYCANETVHGVEFDFIPDVKGAVLVCDMSSNFLSKPVDVSKFGVIFAGAQKNVGSAGVTVVIVRDDLLGFALRECPSVLEYKVQAGNSSLYNTPPCFSIYVMGLVLEWIKNNGGAAAMEKLSSIKSQTIYEIIDNSQGFYVCPVEPQNRSKMNIPFRIGNAKGDDALEKRFLDKALELNMLSLKGHRSVGGIRASLYNAVTIEDVQKLAAFMKKFLEMHQL

SEQ ID NO: 200 - protein, 370 aa, synthetic construct
MDAPRQVVNFGPGPAKLPHSVLLEIQKELLDYKGVGISVLEMSHRSSDFAKIINNTENLVRELLAVPDNYKVIFLQGGGCGQFSAVPLNLIGLKAGRCADYVVTGAWSAKAAEEAKKFGTINIVHPKLGSYTKIPDPSTWNLNPDASYVYYCANETVHGVEFDFIPDVKGAVLVCDMSSNFLPKPVDVSKFGVIFAGAQKNVGSAGVTVVIVRDDLLGFALRECPSVLEYKVQAGNSSLYNTPPCFSIYVMGLVLEWIKNNGGAAAMEKLSSIKSQTIYEIIDNSQGFYVCPVEPQNRSKMNIPFRIGNAKGDDALEKRFLDKALELNMLSLKGHRSVGGIRASLYNAVTIEDVQKLAAFMKKFLEMHQL

SEQ ID NO: 201 - protein, 370 aa, synthetic construct
MDAPRQVVNFGPGPAKLPHSVLLEIQKELLDYKGVGISVLEMSHRSSDFAKIINNTENLVRELLAVPDNYKVIFLQGGGCGQFSAVPLNLIGLKAGRCADYVVTGAWSAKAAEEAKKFGTINIVHPKLGSYTKIPDPSTWNLNPDASYGYYCANETVHGVEFDFIPDVKGAVLVCDMSSNFLSKPVDVSKFGVIFAGAQKNVGSAGVTVVIVRDDLLGFALRECPSVLEYKVQAGNSSLYNTPPCFSIYVMGLVLEWIKNNGGAAAMEKLSSIKSQTIYEIIDNSQGFYVCPVEPQNRSKMNIPFRIGNAKGDDALEKRFLDKALELNMLSLKGHRSVGGIRASLYNAVTIEDVQKLAAFMKKFLEMHQL

SEQ ID NO: 202 - protein, 370 aa, synthetic construct
MDAPRQVVNFGPGPAKLPHSVLLEIQKELLDYKGVGISVLEMSHRSSDFAKIINNTENLVRELLAVPDNYKVIFLQGGGCGQFSAVPLNLIGLKAGRCADYVVTGAWSAKAAEEAKKFGTINIVHPKLGSYTKIPDPSTWNLNPDASYVYYCANETVHGVEFDFIPDVKGAVLVCDMSSNFLSKPVDVSKFGVIFAGAQKNVGSAGVTVVIVRDDLLGFALRECPSVLEYKVQAGNSSLYNTPPCFSIYVMGLVLEWIKNNGGAAAMEKLSSIKSQTIYEIIDNSQGFYVCPVEPQNRSKMNIPFRIGNAKGDDALEKRFLDKALELNMLSSKGHRSVGGIRASLYNAVTIEDVQKLAAFMKKFLEMHQL

SEQ ID NO: 203 - protein, 370 aa, synthetic construct
MDAPRQVVNFGPGPAKLPHSVLLEIQKELLDYKGVGISVLEMSHRSSDFAKIINNTENLVRELLAVPDNYKVIFLQGGGCGQFSAVPLNLIGLKAGRCADYVVTGAWSAKAAEEAKKFGTINIVHPKLGSYTKIPDPSTWNLNPDASYVYYCANETVHGVEFDFIPDVKGAVLVCDMSSNFLSKPVDVSKFGVIFAGAQKNVGSAGVTVVIVRDDLLGFALRECPSVLEYKVQAGNSSLYNTPPCFSIYVMGLVLEWIKNNGGAAAMEKLSSIKSQTIYEIIDNYQGFYVCPVEPQNRSKMNIPFRIGNAKGDDALEKRFLDKALELNMLSLKGHRSVGGIRASLYNAVTIEDVQKLAAFMKKFLEMHQL

SEQ ID NO: 204 - protein, 370 aa, synthetic construct
MDAPRQVVNFGPGPAKLPHSVLLEIQKELLDYKGVGISVLEMSHRSSDFAKIINNTENLVRELLAVPDNYKVIFLRGGGCGQFSAVPLNLIGLKAGRCADYVVTGAWSAKAAEEAKKFGTINIVHPKLGSYTKIPDPSTWNLNPDASYVYYCANETVHGVEFDFIPDVKGAVLVCDMSSNFLSKPVDVSKFGVIFAGAQKNVGSAGVTVVIVRDDLLGFALRECPSVLEYKVQAGNSSLYNTPPCFSIYVMGLVLEWIKNNGGAAAMEKLSSIKSQTIYEIIDNSQGFYVCPVEPQNRSKMNIPFRIGNAKGDDALEKRFLDKALELNMLSLKGHRSVGGIRASLYNAVTIEDVQKLAAFMKKFLEMHQL

SEQ ID NO: 205 - protein, 370 aa, synthetic construct
MDAPRQVVNFGPGPAKLPHSVLLEIQKELLDYKGVGISVLEMSHRSSDFAKIINNTENLVRELLAVPDNYKVIFLQGGGCGQFSAVPLNLIGLKAGRCADYVVTGAWSAKAAEEAKKFGTINIVHPKLGSYTKIPDPSTWNLNPDASYVYYCANETVHGVEFDFIPDVKGAVLVCDMSSNFLSKPVDVSKFGVIFAGAQKNVGSAGVTVVIVRDDLLGFALRECPSVLEYKVQAGNSSLYNTPPCFSIYVMGLVLEWIKNNGGAAAMEKLSSIKSQTIYEIIDNSQGFYVCPVEPQNRSKMNIPFRIGNAKGDDALEKRFLDKALELNMLSLKGHRSVGGIRASLYNAVTIEVVQKLAAFMKKFLEMHQL

SEQ ID NO: 206 - protein, 370 aa, synthetic construct
MDAPRQVVNFGPGPAKLPHSVLLEIQKELLDYKGVGISVLEMSHRSSDFAKIINNTENLVRELLAVPDNYKVIFLQGGGCGQFSAVPLNLIGLKAGRCADYVVTGAWSAKAAEEAKKFGTINIVHPKLGSYTKIPDPSTWNLNPDASYVYYCANETVHGVEFDFIPDVKGAVLVCDMSSNFLSKPVDVSKFGVIFAGAQKNVGSAGVTVVIVRDDLLGFALRECPSVLEYKVQAGNSSLYNTPPCFSIYVMGLVLEWIKNNGGAAAMEKLSSIKSQTIYEIIDNSQGFYVCPVEPQNRSKMNIPSRIGNAKGDDALEKRFLDKALELNMLSLKGHRSVGGIRASLYNAVTIEDVQKLAAFMKKFLEMHQL

SEQ ID NO: 207 - protein, 370 aa, synthetic construct
MDAPRQVVNFGPGPAKLPHSVLLEIQKELLDYKGVGISVLEMSHRSSDFAKIINNTENLVRELLAVPDNYKVIFLQGGGCGQFSAVPLNLIGLKAGRCADYVVTGAWSAKAAEEAKKFGTINIVHPKLGSYTKIPDPSTWNLNPDASYVYYCANETVHGVEFDFIPDVKGAVLVCDMSSNFLSKPVDVSKFGVIFAGPQKNVGSAGVTVVIVRDDLLGFALRECPSVLEYKVQAGNSSLYNTPPCFSIYVMGLVLEWIKNNGGAAAMEKLSSIKSQTIYEIIDNSQGFYVCPVEPQNRSKMNIPFRIGNAKGDDALEKRFLDKALELNMLSLKGHRSVGGIRASLYNAVTIEDVQKLAAFMKKFLEMHQL

SEQ ID NO: 208 - protein, 370 aa, synthetic construct
MDAPRQVVNFGPGPAKLPHSVLLEIQKELLDYKGVGISVLEMSHRSSDFAKIINNTENLVRELLAVPDNYKVIFLQGGGCGQFSAVPLNLIGLKAGRCTDYVVTGAWSAKAAEEAKKFGTINIVHPKLGSYTKIPDPSTWNLNPDASYVYYCANETVHGVEFDFIPDVKGAVLVCDMSSNFLSKPVDVSKFGVIFAGAQKNVGSAGVTVVIVRDDLLGFALRECPSVLEYKVQAGNSSLYNTPPCFSIYVMGLVLEWIKNNGGAAAMEKLSSIKSQTIYEIIDNSQGFYVCPVEPQNRSKMNIPFRIGNAKGDDALEKRFLDKALELNMLSLKGHRSVGGIRASLYNAVTIEDVQKLAAFMKKFLEMHQL

SEQ ID NO: 209 - protein, 370 aa, synthetic construct
MDAPRQVVNFGPGPAKLPHSVLLEIQKELLDYKGVGISVLEMSHRSSDFAKIINNTENLVRELLAVPDNYKVIFLQGGGCGQFSAVPLNLIGLKAGRCADYVVTGAWSAKAAEEAKKFGTINIVHPKLGSYTKIPDPSTWNLNPDASYVYYCANETVHGVEFDFIPDVKGAVLVCDMSSNFLSKPVDVSKFGVIFAGAQKNVGSAGVTVVIVRDDLLGFALRECPSVLEYKVQAGNSSLYNTPPCFSIYVMGLVLEWIKNNGGAAAMEKLSSIKSQTIYEIIDNSQGFYVCPVEPQNRSKMNIPFRIGNAKGDDALEKRFLDKPLELNMLSLKGHRSVGGIRASLYNAVTIEDVQKLAAFMKKFLEMHQL

SEQ ID NO: 210 - protein, 370 aa, synthetic construct
MDAPRQVVNFGPGPAKLPHSVLLEIQKELLDYKGVGISVLEMSNRSSDFAKIINNTENLVRELLAVPDNYKVIFLQGGGCGQFSAVPLNLIGLKAGRCADYVVTGAWSAKAAEEAKKFGTINIVHPKLGSYTKIPDPSTWNLNPDASYVYYCANETVHGVEFDFIPDVKGAVLVCDMSSNFLSKPVDVSKFGVIFAGAQKNVGSAGVTVVIVRDDLLGFALRECPSVLEYKVQAGNSSLYNTPPCFSIYVMGLVLEWIKNNGGAAAMEKLSSIKSQTIYEIIDNSQGFYVCPVEPQNRSKMNIPFRIGNAKGDDALEKRFLDKALELNMLSLKGHRSVGGIRASLYNAVTIEDVQKLAAFMKKFLEMHQL

SEQ ID NO: 211 - protein, 370 aa, synthetic construct
MDAPRQVVNFGPGPAKLPHSVLLEIQKELLDYKGVGISVLEMSHRSSDFAKIINNTENLVRELLAVPDNYKVIFLQGGGCGQFSAVPLNLIGLKAGRCADYVVTGAWSAKAAEEAKKFGTINIVHPKLGSYTKIPDPSTWNLNPDASYVYYCANETVHGVEFDFIPDVKGAVLVCDMSSNFLSKPVDVSKFGVIFAGAQKNVGSAGVTVVIVRDDLLGFALRECPSVLEYKVQAGNSSLYNTPRCFSIYVMGLVLEWIKNNGGAAAMEKLSSIKSQTIYEIIDNSQGFYVCPVEPQNRSKMNIPFRIGNAKGDDALEKRFLDKALELNMLSLKGHRSVGGIRASLYNAVTIEDVQKLAAFMKKFLEMHQL

SEQ ID NO: 212 - protein, 370 aa, synthetic construct
MDAPRQVVNFGPGPAKLPHSVLLEIQKELLDYKGVGISVLEMSHRSSDFAKIINNTENLVRELLAVPDNYKVIFLQGGGCGQFSAVPLNLIGLKAGRCADYVVTGAWSAKAAEEAKKFGTINIVHPKLGSYTKIPDPSTWNLNPDASYVYYCANETVHGVEFDFIPDVKGAVLVCDMSSNFLSKPVDVSKFGVIFAGAQKNVGSAGVTVVIVRDDLLGFALRECPSVLEYKVQAGNSSLYNTPPCFSIYVMGLVLEWIKNNGGAAAMEKLSPIKSQTIYEIIDNSQGFYVCPVEPQNRSKMNIPFRIGNAKGDDALEKRFLDKALELNMLSLKGHRSVGGIRASLYNAVTIEDVQKLAAFMKKFLEMHQL

SEQ ID NO: 213 - protein, 370 aa, synthetic construct
MDAPRQVVNFGPGPAKLPHSVLLEIQKELLDYKGVGISVLEMSHRSSDFAKIINNTENLVRELLAVPDNYKVIFLQGGGCGQFSAVPLNLIGLKAGRCADYVVTGAWSAKAAEEAKKFGTINIVHPKLGSYTKIPDPSTWNLNPDASYVYYCANETVHGVEFDFIPDVKGAVLVCDMSSNFLSKPVDVSKFGVIFAGAQKNVGSAGVTVVIVRDDLLGFALRECPSVLEYKVQAGNSSLYNTPPCFSIYVMGLVLEWIKNNGGAAAMEKLSSIKSQTIYEIIDNSQGFYVCPVEPQNRSKMNIPFRIGNAKGDDALEKRFLDKALELNRLSLKGHRSVGGIRASLYNAVTIEDVQKLAAFMKKFLEMHQL

SEQ ID NO: 214 - protein, 370 aa, synthetic construct
MDAPRQVVNFGPGPAKLPHSVLLEIQKELLDYKGVGISVLEMSHRSSDFAKIINNTENLVRELLAVPDNYKVIFLQGGGCGQFSAVPLNLIGLKAGRCADYVVTGAWSAKAAEEAKKFGTINIVHPKLGSYTKIPDPSTWNLNPDASYVYYCANATVHGVEFDFIPDVKGAVLVCDMSSNFLSKPVDVSKFGVIFAGAQKNVGSAGVTVVIVRDDLLGFALRECPSVLEYKVQAGNSSLYNTPPCFSIYVMGLVLEWIKNNGGAAAMEKLSSIKSQTIYEIIDNSQGFYVCPVEPQNRSKMNIPFRIGNAKGDDALEKRFLDKALELNMLSLKGHRSVGGIRASLYNAVTIEDVQKLAAFMKKFLEMHQL

SEQ ID NO: 215 - protein, 370 aa, synthetic construct
MDAPRQVVNFGPGPAKLPHSVLLEIQKELLDYKGVGISVLEMSPRSSDFAKIINNTENLVRELLAVPDNYKVIFLQGGGCGQFSAVPLNLIGLKAGRCADYVVTGAWSAKAAEEAKKFGTINIVHPKLGSYTKIPDPSTWNLNPDASYVYYCANETVHGVEFDFIPDVKGAVLVCDMSSNFLSKPVDVSKFGVIFAGAQKNVGSAGVTVVIVRDDLLGFALRECPSVLEYKVQAGNSSLYNTPPCFSIYVMGLVLEWIKNNGGAAAMEKLSSIKSQTIYEIIDNSQGFYVCPVEPQNRSKMNIPFRIGNAKGDDALEKRFLDKALELNMLSLKGHRSVGGIRASLYNAVTIEDVQKLAAFMKKFLEMHQL

SEQ ID NO: 216 - protein, 370 aa, synthetic construct
MDAPRQVVNFVPGPAKLPHSVLLEIQKELLDYKGVGISVLEMSHRSSDFAKIINNTENLVRELLAVPDNYKVIFLQGGGCGQFSAVPLNLIGLKAGRCADYVVTGAWSAKAAEEAKKFGTINIVHPKLGSYTKIPDPSTWNLNPDASYVYYCANETVHGVEFDFIPDVKGAVLVCDMSSNFLSKPVDVSKFGVIFAGAQKNVGSAGVTVVIVRDDLLGFALRECPSVLEYKVQAGNSSLYNTPPCFSIYVMGLVLEWIKNNGGAAAMEKLSSIKSQTIYEIIDNSQGFYVCPVEPQNRSKMNIPFRIGNAKGDDALEKRFLDKALELNMLSLKGHRSVGGIRASLYNAVTIEDVQKLAAFMKKFLEMHQL

SEQ ID NO: 217 - protein, 370 aa, synthetic construct
MDAPRQVVNFGPGPAKLPHSVLLEIQKELLDYKGVGISVLEMSHRSSDFAKIINNTENLVRELLAVPDNYKVIFLQGGGCGQFSAVPLNLIGLKAGRCADYVVTGAWSAKAAEEAKKFGTINIVHPKLGSYTKIPDPSTWNLNPDASYVYYCANETVHGVEFDFIPDVKGAVLVCDMSSNFLSKPVDVSKFGVIFAGAQKNVGSAGVTVVIVRDDLLGFALRECPSVLEYKVQAGNSSLYNTPPCFSIYVMGLVLEWIKNNGGAAAMEKLSSIKSQTIYEIIDNSQGFYVCPVEPQNRSKMNIPFRIGNAKGDDALEKRFLDKALELNMLSLKGHRSVGGIRASLCNAVTIEDVQKLAAFMKKFLEMHQL

SEQ ID NO: 218 - protein, 370 aa, synthetic construct
MDAPRQVVNFGPGPAKLPHSVLLEIQKELLDYKGVGISVLEMSHRSSDFAKIINNTENLVRELPAVPDNYKVIFLQGGGCGQFSAVPLNLIGLKAGRCADYVVTGAWSAKAAEEAKKFGTINIVHPKLGSYTKIPDPSTWNLNPDASYVYYCANETVHGVEFDFIPDVKGAVLVCDMSSNFLSKPVDVSKFGVIFAGAQKNVGSAGVTVVIVRDDLLGFALRECPSVLEYKVQAGNSSLYNTPPCFSIYVMGLVLEWIKNNGGAAAMEKLSSIKSQTIYEIIDNSQGFYVCPVEPQNRSKMNIPFRIGNAKGDDALEKRFLDKALELNMLSLKGHRSVGGIRASLYNAVTIEDVQKLAAFMKKFLEMHQL

SEQ ID NO: 219 - protein, 370 aa, synthetic construct
MDAPRQVVNFGPGPAKLPHSVLLEIQKELLDYKGVGISVLEMSHRSSDFAKIINNTENLVRELLAVPDNYKVIFLQGGGCGQFSAVPLNLIGLKAGRCADYVVTGAWSAKAAEEAKKFGTINIVHPKLGSYTKIPDPSTWNLNPDASYVYYCANETVHGVEFDFIPDVKGAVLGCDMSSNFLSKPVDVSKFGVIFAGAQKNVGSAGVTVVIVRDDLLGFALRECPSVLEYKVQAGNSSLYNTPPCFSIYVMGLVLEWIKNNGGAAAMEKLSSIKSQTIYEIIDNSQGFYVCPVEPQNRSKMNIPFRIGNAKGDDALEKRFLDKALELNMLSLKGHRSVGGIRASLYNAVTIEDVQKLAAFMKKFLEMHQL

SEQ ID NO: 220 - protein, 370 aa, synthetic construct
MDAPRQVVNFGPGPAKLPHSVLLEIQKELLDYKGVGISVLEMSHRSSDFAKIINNTENLVRELLAVPDNYKVIFLQGGGCGQFSAVPLNLIGLKAGRCADYVVTGAWSAKAAEEAKKFVTINIVHPKLGSYTKIPDPSTWNLNPDASYVYYCANETVHGVEFDFIPDVKGAVLVCDMSSNFLSKPVDVSKFGVIFAGAQKNVGSAGVTVVIVRDDLLGFALRECPSVLEYKVQAGNSSLYNTPPCFSIYVMGLVLEWIKNNGGAAAMEKLSSIKSQTIYEIIDNSQGFYVCPVEPQNRSKMNIPFRIGNAKGDDALEKRFLDKALELNMLSLKGHRSVGGIRASLYNAVTIEDVQKLAAFMKKFLEMHQL

SEQ ID NO: 221 - protein, 370 aa, synthetic construct
MDAPRQVVNFGPGPAKLPHSVLLEIQKELLDYKGVGISVLEMSHRSSDFAKIINNTENLVRELLAVPDNYKVIFLQGGGCGQFSAVPLNLIGLKAGRCADYVVTGAWSAKAAEEAKKFGTINIVHPKLGSYTKIPDPSTWNLNPDASYVYYCANETVHGVEFDFIPDVKGAVLVFDMSSNFLSKPVDVSKFGVIFAGAQKNVGSAGVTVVIVRDDLLGFALRECPSVLEYKVQAGNSSLYNTPPCFSIYVMGLVLEWIKNNGGAAAMEKLSSIKSQTIYEIIDNSQGFYVCPVEPQNRSKMNIPFRIGNAKGDDALEKRFLDKALELNMLSLKGHRSVGGIRASLYNAVTIEDVQKLAAFMKKFLEMHQL

SEQ ID NO: 222 - protein, 370 aa, synthetic construct
MDAPRQVVNFGPGPAKLPHSVLLEIQKELLDYKGVGISVLEMSHRSSDFAKIINNTENLVRELLAVPDNYKVIFLQGGGCGQFSAVPLNLIGLKAGRCADYVVTEAWSAKAAEEAKKFGTINIVHPKLGSYTKIPDPSTWNLNPDASYVYYCANETVHGVEFDFIPDVKGAVLVCDMSSNFLSKPVDVSKFGVIFAGAQKNVGSAGVTVVIVRDDLLGFALRECPSVLEYKVQAGNSSLYNTPPCFSIYVMGLVLEWIKNNGGAAAMEKLSSIKSQTIYEIIDNSQGFYVCPVEPQNRSKMNIPFRIGNAKGDDALEKRFLDKALELNMLSLKGHRSVGGIRASLYNAVTIEDVQKLAAFMKKFLEMHQL

SEQ ID NO: 223 - protein, 370 aa, synthetic construct
MDAPRQVVNFGPGPAKLPHSVLLEIQKELLDYKGVGISVLEMSHRSSDFAKIINNTENLVRELLAVPDNYKVIFLQGGGCGQFSAVPLNLIGLKAGRCADYVVTGAWSAKAAEEAKKFGTINIVHPKLGSYTKIPDPSTWNLNPDASYVYYCAIETVHGVEFDFIPDVKGAVLVCDMSSNFLSKPVDVSKFGVIFAGAQKNVGSAGVTVVIVRDDLLGFALRECPSVLEYKVQAGNSSLYNTPPCFSIYVMGLVLEWIKNNGGAAAMEKLSSIKSQTIYEIIDNSQGFYVCPVEPQNRSKMNIPFRIGNAKGDDALEKRFLDKALELNMLSLKGHRSVGGIRASLYNAVTIEDVQKLAAFMKKFLEMHQL

SEQ ID NO: 224 - protein, 370 aa, synthetic construct
MDAPRQVVNFGPGPAKLPHSVLLEIQKELLDYKGVGISVLEMSHRSSDFAKIINNTENLVRELLAVPDNYKVIFLQGGGCGQFSAVPLNLIGLKAGRCADYVVTGAWSAKAAEEAKKFGTINIVHPKLGSYTKIPDPSTWNLNPDASYVYYCANESVHGVEFDFIPDVKGAVLVCDMSSNFLSKPVDVSKFGVIFAGAQKNVGSAGVTVVIVRDDLLGFALRECPSVLEYKVQAGNSSLYNTPPCFSIYVMGLVLEWIKNNGGAAAMEKLSSIKSQTIYEIIDNSQGFYVCPVEPQNRSKMNIPFRIGNAKGDDALEKRFLDKALELNMLSLKGHRSVGGIRASLYNAVTIEDVQKLAAFMKKFLEMHQL

SEQ ID NO: 225 - protein, 370 aa, synthetic construct
MDAPRQVVNFGPGPAKLPHSVLLEIQKELLDYKGVGISVLEMSHRSSDFAKIINNTENLVRELLAVPDNYKVIFLQGGGCGQFSAVPLNLIGLKAGRCADYVVTGAWSAKAAEEAKKFGTINIVHPKLGSYTKIPDPSTWNLNPDASYVYYCANETVHGVEFDFIPDVKGAVLVCDMSSNFLSKPVDVSKFGVIFAGAQKNVGSAGVTVVIVRDDLLGFALRECPSVLEYKVQAGNSSLYNTPPCFSIYVMGLVLEWIKNNGGAAAMEKLSSIKPQTIYEIIDNSQGFYVCPVEPQNRSKMNIPFRIGNAKGDDALEKRFLDKALELNMLSLKGHRSVGGIRASLYNAVTIEDVQKLAAFMKKFLEMHQL

SEQ ID NO: 226 - protein, 370 aa, synthetic construct
MDAPRQVVNFGPGPAKLPHSVLLEIQKELLDYKGVGISVLEMSHRSSDFAKIINNTENLVRELLAVPDNYKVIFLQGGGCGQFSAVPLNLIGLKAGRCADYVVTGAWSAKAAEEAKKFGTINIVHPKLGSYTKIPDPSTWNLNPDASYVYYCANETVHGVEFDFIPDVKGAVLVCDMSSNFLSKPVDVSKFGVIFAGAQKNVGSAGVTVVIVRDDLLGFALRECPSVLEYKVQAGNSSLYNTPPCFSIYVMGLVLEWIKNNGGAAAMEKPSSIKSQTIYEIIDNSQGFYVCPVEPQNRSKMNIPFRIGNAKGDDALEKRFLDKALELNMLSLKGHRSVGGIRASLYNAVTIEDVQKLAAFMKKFLEMHQL

SEQ ID NO: 227 - protein, 370 aa, synthetic construct
MDAPRQVVNFGPGPAKLPHSVLLEIQKELLDYKGVGISVLEMSHRSSDFAKIINNTENLVRELLAVPDNYKVIFLQGGGCGQFSAVPLNLIGLKAGRCADYVVTGAWSAKVAEEAKKFGTINIVHPKLGSYTKIPDPSTWNLNPDASYVYYCANETVHGVEFDFIPDVKGAVLVCDMSSNFLSKPVDVSKFGVIFAGAQKNVGSAGVTVVIVRDDLLGFALRECPSVLEYKVQAGNSSLYNTPPCFSIYVMGLVLEWIKNNGGAAAMEKLSSIKSQTIYEIIDNSQGFYVCPVEPQNRSKMNIPFRIGNAKGDDALEKRFLDKALELNMLSLKGHRSVGGIRASLYNAVTIEDVQKLAAFMKKFLEMHQL

SEQ ID NO: 228 - protein, 370 aa, synthetic construct
MDAPRQVVNFGPGPAKLPHSVLLEIQKELLDYKGVGISVLEMSHRSSDFAKIINNTENLVRELLAVPDNYKVIFLQGGGCGQFSAVPLNLIGLKAGRCADYVVTGAWSAKAAEEAKKFGTINIVHPKLGSYTKIPDPSTWNLNPDASYVYYCANETVHGVEFDFIPDVKGAVLVCDMSSNFLSKPVDVSKFGVIFAGAQKNVGSAGVTVVIVRDDLLGFALRECPSVLEYKVQAGNSSLYNTPPCFSIYVMGLVLEWIKNNGGAAAMEKLSSIKSQTIYEIIDNSQGFYVCPVEPQNRSKMNIPFRIGNAKGDDALEKRFLDKALELNMLSLKGHRSVGCIRASLYNAVTIEDVQKLAAFMKKFLEMHQL

SEQ ID NO: 229 - protein, 370 aa, synthetic construct
MDAPRQVVNFGPGPAKLPHSVLLEIQKELLDYKGVGISVLEMSHRSSDFAKIINNTENLVRELLAVPDNYKVIFLQGGGCGQFSAVPLNLIGLKAGRCADYVVTGAWSAKAAEEAKKFGTINIVHPKLGSYTKIPDPSTWNLNPDASYVYYCANETVHGVEFDFIPDVKGAVLVCDMSSNSLSKPVDVSKFGVIFAGAQKNVGSAGVTVVIVRDDLLGFALRECPSVLEYKVQAGNSSLYNTPPCFSIYVMGLVLEWIKNNGGAAAMEKLSSIKSQTIYEIIDNSQGFYVCPVEPQNRSKMNIPFRIGNAKGDDALEKRFLDKALELNMLSLKGHRSVGGIRASLYNAVTIEDVQKLAAFMKKFLEMHQL

SEQ ID NO: 230 - protein, 370 aa, synthetic construct
MDAPRQVVNFGPGPAKLPHSVLLEIQKELLDYKGVGISVLEMSHRSSDFAKIINNTENLVRELLAVPDNYKVIFLQGGGCGQFSAVPLNLIGLKAGRCADYVVTGAWSAKAAEEAKKFGTINIVHPKLGSYTKIPDPSTWNLNPDASYVYYCANETVHGVEFDFIPDVKGAVLVCDMSSNFLSKPVDVSKFGVIFAGAQKNVGSAGVTVVIVRDDLLGFALRECPSVLEYKVQAGNSSLYNTPPCFRIYVMGLVLEWIKNNGGAAAMEKLSSIKSQTIYEIIDNSQGFYVCPVEPQNRSKMNIPFRIGNAKGDDALEKRFLDKALELNMLSLKGHRSVGGIRASLYNAVTIEDVQKLAAFMKKFLEMHQL

SEQ ID NO: 231 - protein, 370 aa, synthetic construct
MDAPRQVVNFGPGPAKLPHSVLLEIQKELLDYKGVGISVLEMSHRSSDFAKIINNTENLVRELLAVPDNYKVIFLQGGGCGQFSAVPLNLIGLKAGRCADYVVTGAWSAKAAEEAKKFGTINIVHPKLGSYTKIPDPSTWNLNPDASYVYYCANETVHGVEFDFIPDVKGAVLVCDMSSNFLSKPVDVSKFGVIFAGAQKNVGSAGVTVVIVRDDLLGFALRECPSVLEYKVQAGNSSLYNTPPCFSIYVMGLVLEWIKNNGGAAAMEKLSSIKSQTIYEIIDNSQGFYVCPVEPQNRSKMNIPFRIGNAKGDDALEKRFLDKALELNMLSLKGPRSVGGIRASLYNAVTIEDVQKLAAFMKKFLEMHQL

SEQ ID NO: 232 - protein, 370 aa, synthetic construct
MDAPRQVVNFGPGPAKLPHSVLLEIQKELLDYKGVGISVLEMSHRSSDFAKIINNTENLVRELLAVPDNYKVIFLQGGGCGQFSAVPLNLIGLKAGRCADYVVTGAWSAKAAEEAKKFGTINIVHPKLGSYTKIPDPSTWNLNPDASYVYYCANDTVHGVEFDFIPDVKGAVLVCDMSSNFLSKPVDVSKFGVIFAGAQKNVGSAGVTVVIVRDDLLGFALRECPSVLEYKVQAGNSSLYNTPPCFSIYVMGLVLEWIKNNGGAAAMEKLSSIKSQTIYEIIDNSQGFYVCPVEPQNRSKMNIPFRIGNAKGDDALEKRFLDKALELNMLSLKGHRSVGGIRASLYNAVTIEDVQKLAAFMKKFLEMHQL

SEQ ID NO: 233 - protein, 370 aa, synthetic construct
MDAPRQVVNFGPGPAKLPHSVLLEIQKELLDYKGVGISVLEMSQRSSDFAKIINNTENLVRELLAVPDNYKVIFLQGGGCGQFSAVPLNLIGLKAGRCADYVVTGAWSAKAAEEAKKFGTINIVHPKLGSYTKIPDPSTWNLNPDASYVYYCANETVHGVEFDFIPDVKGAVLVCDMSSNFLSKPVDVSKFGVIFAGAQKNVGSAGVTVVIVRDDLLGFALRECPSVLEYKVQAGNSSLYNTPPCFSIYVMGLVLEWIKNNGGAAAMEKLSSIKSQTIYEIIDNSQGFYVCPVEPQNRSKMNIPFRIGNAKGDDALEKRFLDKALELNMLSLKGHRSVGGIRASLYNAVTIEDVQKLAAFMKKFLEMHQL

SEQ ID NO: 234 - protein, 370 aa, synthetic construct
MDAPRQVVNFGPGPAKLPHSVLLEIQKELLDYKGVGISVLEMSHRSSDFAKIINNTENLVRELLAVPDNYKVIFLQGGGCGQFSAVPLNLIGLKAGRCADYVVTGAWSAKAAEEAKKFGTINIVHPKLGSYTKIPDPSTWNLNPDASYVYYCANETVHGVEFDFIPDVKGAVLVCDMSSNFLSKPVDVSKSGVIFAGAQKNVGSAGVTVVIVRDDLLGFALRECPSVLEYKVQAGNSSLYNTPPCFSIYVMGLVLEWIKNNGGAAAMEKLSSIKSQTIYEIIDNSQGFYVCPVEPQNRSKMNIPFRIGNAKGDDALEKRFLDKALELNMLSLKGHRSVGGIRASLYNAVTIEDVQKLAAFMKKFLEMHQL

SEQ ID NO: 235 - protein, 370 aa, synthetic construct
MDAPRQVVNFGPGPAKLPHSVLLEIQKELLDYKGVGISVLEMSHRSSDFAKIINNTENLVRELLAVPDNYKVIFLQGGGCGQFSAVPLNLIGLKAGRCADYVVTGAWSAKAAEEAKKFGTINIVHPKLGSYTKIPDPSTWNLNPDASYVYYCANETVHGVEFDFIPDVKGAVLVCDMSSNFLSKPVDVSKFGVIFAGAQKNVGSAGVTVVIVRDDLLGFALRECPSVLEYKVQAGNSSLYNTPPCFSIYVMGLVLEWIKNNGGAAAMEKLSSIKSQTIYEIIDNSQGFYVCPVEPQNRSKMNNPFRIGNAKGDDALEKRFLDKALELNMLSLKGHRSVGGIRASLYNAVTIEDVQKLAAFMKKFLEMHQL

SEQ ID NO: 236 - protein, 370 aa, synthetic construct
MDAPRQVVNFGPGPAKLPHSVLLEIQKELLDYKGVGISVLEMSHRSSDFAKIINNTENLVRELLAVPDNYKVIFLQGGGCGQFSAVPLNLIGLKAGRCADYVVKGAWSAKAAEEAKKFGTINIVHPKLGSYTKIPDPSTWNLNPDASYVYYCANETVHGVEFDFIPDVKGAVLVCDMSSNFLSKPVDVSKFGVIFAGAQKNVGSAGVTVVIVRDDLLGFALRECPSVLEYKVQAGNSSLYNTPPCFSIYVMGLVLEWIKNNGGAAAMEKLSSIKSQTIYEIIDNSQGFYVCPVEPQNRSKMNIPFRIGNAKGDDALEKRFLDKALELNMLSLKGHRSVGGIRASLYNAVTIEDVQKLAAFMKKFLEMHQL

SEQ ID NO: 237 - protein, 370 aa, synthetic construct
MDAPRQVVNFGPGPAKLPHSVLLEIQKELLDYKGVGISVLEMSHRSSDFAKIINNTENLVRELLAVPDNYKVIFLQGGGCGQFSAVPLNLIGLKAGRCADYVVTGAWSAKAAEEAKKFWTINIVHPKLGSYTKIPDPSTWNLNPDASYVYYCANETVHGVEFDFIPDVKGAVLVCDMSSNFLSKPVDVSKFGVIFAGAQKNVGSAGVTVVIVRDDLLGFALRECPSVLEYKVQAGNSSLYNTPPCFSIYVMGLVLEWIKNNGGAAAMEKLSSIKSQTIYEIIDNSQGFYVCPVEPQNRSKMNIPFRIGNAKGDDALEKRFLDKALELNMLSLKGHRSVGGIRASLYNAVTIEDVQKLAAFMKKFLEMHQL

SEQ ID NO: 238 - protein, 370 aa, synthetic construct
MDAPRQVVNFGPGPAKLPHSVLLEIQKELLDYKGVGISVLEMSHRSSDFAKIINNTENLVRELLAVPDNYKVIFLQGGGCGQFSAVPLNLIGLKAGRCADYVVTGAWSAKAAEEAKKFGTINIVHPKLGSYTKIPDPSTWNLNPDASYVYYCANETVHGVEFDFIPDVKGAVLVCDMSSNFLSKPVDVSKFGVIFAGAQKNVGSAGVTVVIVRDDLLGFALRECPSVLEYKVQAGNSSLYNTPPCFSIYVMGLVLEWIKNNGGAAAMEKLSSIKSPTIYEIIDNSQGFYVCPVEPQNRSKMNIPFRIGNAKGDDALEKRFLDKALELNMLSLKGHRSVGGIRASLYNAVTIEDVQKLAAFMKKFLEMHQL

SEQ ID NO: 239 - protein, 370 aa, synthetic construct
MDAPRQVVNFGPGAAKLPHSVLLEIQKELLDYKGVGISVLEMSHRSSDFAKIINNTENLVRELLAVPDNYKVIFLQGGGCGQFSAVPLNLIGLKAGRCADYVVTGAWSAKAAEEAKKFGTINIVHPKLGSYTKIPDPSTWNLNPDASYVYYCANETVHGVEFDFIPDVKGAVLVCDMSSNFLSKPVDVSKFGVIFAGAQKNVGSAGVTVVIVRDDLLGFALRECPSVLEYKVQAGNSSLYNTPPCFSIYVMGLVLEWIKNNGGAAAMEKLSSIKSQTIYEIIDNSQGFYVCPVEPQNRSKMNIPFRIGNAKGDDALEKRFLDKALELNMLSLKGHRSVGGIRASLYNAVTIEDVQKLAAFMKKFLEMHQL

SEQ ID NO: 240 - protein, 370 aa, synthetic construct
MDAPRQVVNFGPGPAKLPHSVLLEIQKELLDYKGVGISVLEMSHRSSDFAKIINNTENPVRELLAVPDNYKVIFLQGGGCGQFSAVPLNLIGLKAGRCADYVVTGAWSAKAAEEAKKFGTINIVHPKLGSYTKIPDPSTWNLNPDASYVYYCANETVHGVEFDFIPDVKGAVLVCDMSSNFLSKPVDVSKFGVIFAGAQKNVGSAGVTVVIVRDDLLGFALRECPSVLEYKVQAGNSSLYNTPPCFSIYVMGLVLEWIKNNGGAAAMEKLSSIKSQTIYEIIDNSQGFYVCPVEPQNRSKMNIPFRIGNAKGDDALEKRFLDKALELNMLSLKGHRSVGGIRASLYNAVTIEDVQKLAAFMKKFLEMHQL

SEQ ID NO: 241 - protein, 370 aa, synthetic construct
MDAPRQVVNFGPGPAKLPHSVLLEIQKELLDYKGVGISVLEMSHRSSDFAKIINNTENLVRELLAVPDNYKVIFLQGGGCGQFSAVPLNLIGLKAGRCADYVVTGAWSAKAAEEAKKFGTIIIVHPKLGSYTKIPDPSTWNLNPDASYVYYCANETVHGVEFDFIPDVKGAVLVCDMSSNFLSKPVDVSKFGVIFAGAQKNVGSAGVTVVIVRDDLLGFALRECPSVLEYKVQAGNSSLYNTPPCFSIYVMGLVLEWIKNNGGAAAMEKLSSIKSQTIYEIIDNSQGFYVCPVEPQNRSKMNIPFRIGNAKGDDALEKRFLDKALELNMLSLKGHRSVGGIRASLYNAVTIEDVQKLAAFMKKFLEMHQL

SEQ ID NO: 242 - protein, 370 aa, synthetic construct
MDAPRQVVNFGPGPAKRPHSVLLEIQKELLDYKGVGISVLEMSHRSSDFAKIINNTENLVRELLAVPDNYKVIFLQGGGCGQFSAVPLNLIGLKAGRCADYVVTGAWSAKAAEEAKKFGTINIVHPKLGSYTKIPDPSTWNLNPDASYVYYCANETVHGVEFDFIPDVKGAVLVCDMSSNFLSKPVDVSKFGVIFAGAQKNVGSAGVTVVIVRDDLLGFALRECPSVLEYKVQAGNSSLYNTPPCFSIYVMGLVLEWIKNNGGAAAMEKLSSIKSQTIYEIIDNSQGFYVCPVEPQNRSKMNIPFRIGNAKGDDALEKRFLDKALELNMLSLKGHRSVGGIRASLYNAVTIEDVQKLAAFMKKFLEMHQL

SEQ ID NO: 243 - protein, 370 aa, synthetic construct
MDAPRQVVNFGPGPAKLPHSVLLEIQKELLDYKGVGISVLEMSHRSSDFAKIINNTENLVRELLAVPDNYKVIFLQGGGCGQFSAVPLNLIGLKAGRCADYVVTGAWSAKAAEEVKKFGTINIVHPKLGSYTKIPDPSTWNLNPDASYVYYCANETVHGVEFDFIPDVKGAVLVCDMSSNFLSKPVDVSKFGVIFAGAQKNVGSAGVTVVIVRDDLLGFALRECPSVLEYKVQAGNSSLYNTPPCFSIYVMGLVLEWIKNNGGAAAMEKLSSIKSQTIYEIIDNSQGFYVCPVEPQNRSKMNIPFRIGNAKGDDALEKRFLDKALELNMLSLKGHRSVGGIRASLYNAVTIEDVQKLAAFMKKFLEMHQL

SEQ ID NO: 244 - protein, 370 aa, synthetic construct
MDAPRQVVNFGPGSAKLPHSVLLEIQKELLDYKGVGISVLEMSHRSSDFAKIINNTENLVRELLAVPDNYKVIFLQGGGCGQFSAVPLNLIGLKAGRCADYVVTGAWSAKAAEEAKKFGTINIVHPKLGSYTKIPDPSTWNLNPDASYVYYCANETVHGVEFDFIPDVKGAVLVCDMSSNFLSKPVDVSKFGVIFAGAQKNVGSAGVTVVIVRDDLLGFALRECPSVLEYKVQAGNSSLYNTPPCFSIYVMGLVLEWIKNNGGAAAMEKLSSIKSQTIYEIIDNSQGFYVCPVEPQNRSKMNIPFRIGNAKGDDALEKRFLDKALELNMLSLKGHRSVGGIRASLYNAVTIEDVQKLAAFMKKFLEMHQL

SEQ ID NO: 245 - protein, 370 aa, synthetic construct
MDAPRQVVNFWPGPAKLPHSVLLEIQKELLDYKGVGISVLEMSHRSSDFAKIINNTENLVRELLAVPDNYKVIFLQGGGCGQFSAVPLNLIGLKAGRCADYVVTGAWSAKAAEEAKKFGTINIVHPKLGSYTKIPDPSTWNLNPDASYVYYCANETVHGVEFDFIPDVKGAVLVCDMSSNFLSKPVDVSKFGVIFAGAQKNVGSAGVTVVIVRDDLLGFALRECPSVLEYKVQAGNSSLYNTPPCFSIYVMGLVLEWIKNNGGAAAMEKLSSIKSQTIYEIIDNSQGFYVCPVEPQNRSKMNIPFRIGNAKGDDALEKRFLDKALELNMLSLKGHRSVGGIRASLYNAVTIEDVQKLAAFMKKFLEMHQL

SEQ ID NO: 246 - protein, 370 aa, synthetic construct
MDAPRQVVNFGPGPAKLPHSVLLEIQKELLDYKGVGISVLEMSHRSSDFAKIINNTENLVRELLAVPDNYKVIFLQGGGCGQFSAVPLNLIGLKAGRCADYVVTGAWSAKAAEEAKKFGTINIVHPKLGSYTKIPDPSTWNLNPDASYVYYCANETVHGVEFDFIPDVKGAVLVCDMSSNFLSKPVDVSKFGVIFAGAQKNVGSAGVTVVIVRDDLLGFALRECPSVLEYKVQAGNSSLYNTPPCFSIYVMGLVLEWIKNNGGAAAMEKLSSIKSQTIYEIIDNSQGFYVCPVEPQNRCKMNIPFRIGNAKGDDALEKRFLDKALELNMLSLKGHRSVGGIRASLYNAVTIEDVQKLAAFMKKFLEMHQL

SEQ ID NO: 247 - protein, 370 aa, synthetic construct
MDAPRQVVNFGPGPAKLPHSVWLEIQKELLDYKGVGISVLEMSHRSSDFAKIINNTENLVRELLAVPDNYKVIFLQGGGCGQFSAVPLNLIGLKAGRCADYVVTGAWSAKAAEEAKKFGTINIVHPKLGSYTKIPDPSTWNLNPDASYVYYCANETVHGVEFDFIPDVKGAVLVCDMSSNFLSKPVDVSKFGVIFAGAQKNVGSAGVTVVIVRDDLLGFALRECPSVLEYKVQAGNSSLYNTPPCFSIYVMGLVLEWIKNNGGAAAMEKLSSIKSQTIYEIIDNSQGFYVCPVEPQNRSKMNIPFRIGNAKGDDALEKRFLDKALELNMLSLKGHRSVGGIRASLYNAVTIEDVQKLAAFMKKFLEMHQL

SEQ ID NO: 248 - protein, 370 aa, synthetic construct
MDAPRQVVNFGPGPAKLPHSVLLEIQKELLDYKGVGISVLEMSHRSSDFAKIINNTENLVRELLAVPDNYKVIFLQGGGCGQFSAVPLNLIGLKAGRCADYVVTGAWSAKAAEEAKKFGTINIVHPKLGSYTKIPDPSTWNLNPDASYVYYCANETVHGVEFDFIPDVKGAVLVCDMSSNFLSKPVDVSKFGVIFAGAQKNVGSAGVTVVIVRDDLLGFALRECPSVLEYKVQAGNSSLYNTPPCFSIYVMGLVLEWIKNNGGAAAMEKLSSIKSQTIYEIIDNSQGFYVCPVEPQNRSKMNIPFRIGNAKGDDALEKRFLDKALELNMLSLKGHRSVGGIRASLYNAVTIEDVQKLAAFMKKLLEMHQL

SEQ ID NO: 249 - protein, 370 aa, synthetic construct
MDAPRQVVNFGPGPAKLPHSVLLEIQKELLDYKGVGISVLEMSHWSSDFAKIINNTENLVRELLAVPDNYKVIFLQGGGCGQFSAVPLNLIGLKAGRCADYVVTGAWSAKAAEEAKKFGTINIVHPKLGSYTKIPDPSTWNLNPDASYVYYCANETVHGVEFDFIPDVKGAVLVCDMSSNFLSKPVDVSKFGVIFAGAQKNVGSAGVTVVIVRDDLLGFALRECPSVLEYKVQAGNSSLYNTPPCFSIYVMGLVLEWIKNNGGAAAMEKLSSIKSQTIYEIIDNSQGFYVCPVEPQNRSKMNIPFRIGNAKGDDALEKRFLDKALELNMLSLKGHRSVGGIRASLYNAVTIEDVQKLAAFMKKFLEMHQL

SEQ ID NO: 250 - protein, 370 aa, synthetic construct
MDAPRQVVNFGPGPAKLPHSVLLEIQKELLDYKGVGISVLEMSHRSSDFAKIINNTENLVRELLAVPDNYKVIFLQGGGCGQFSAVPLNLIGLKAGRCADYVVTGAWSAKAAEEAKKFGTINIVHPKLGSYTKIPDPSTWNLNPDASYVYYCANETVHGVEFDFIPDVKGAVLVCDMSSNFLSKPVDVSKFGVIFAGAQKNVGSAGVTVVIVRDDLLGFALRECPSVLEYKVQAGNSSLYYTPPCFSIYVMGLVLEWIKNNGGAAAMEKLSSIKSQTIYEIIDNSQGFYVCPVEPQNRSKMNIPFRIGNAKGDDALEKRFLDKALELNMLSLKGHRSVGGIRASLYNAVTIEDVQKLAAFMKKFLEMHQL

SEQ ID NO: 251 - protein, 370 aa, synthetic construct
MDAPRQVVNFGPGPAKLPHSVLLEIQKELLDYKGVGISVLEMSHRSSDFAKIINNTENLVRELLAVPDNCKVIFLQGGGCGQFSAVPLNLIGLKAGRCADYVVTGAWSAKAAEEAKKFGTINIVHPKLGSYTKIPDPSTWNLNPDASYVYYCANETVHGVEFDFIPDVKGAVLVCDMSSNFLSKPVDVSKFGVIFAGAQKNVGSAGVTVVIVRDDLLGFALRECPSVLEYKVQAGNSSLYNTPPCFSIYVMGLVLEWIKNNGGAAAMEKLSSIKSQTIYEIIDNSQGFYVCPVEPQNRSKMNIPFRIGNAKGDDALEKRFLDKALELNMLSLKGHRSVGGIRASLYNAVTIEDVQKLAAFMKKFLEMHQL

SEQ ID NO: 252 - protein, 370 aa, synthetic construct
MDAPRQVVNFGPGPAKLPHSVLLEIQKELLDYKGVGISVLEMSHRSSDFAKIINNTENLVRELLAVPDNYKVIFRQGGGCGQFSAVPLNLIGLKAGRCADYVVTGAWSAKAAEEAKKFGTINIVHPKLGSYTKIPDPSTWNLNPDASYVYYCANETVHGVEFDFIPDVKGAVLVCDMSSNFLSKPVDVSKFGVIFAGAQKNVGSAGVTVVIVRDDLLGFALRECPSVLEYKVQAGNSSLYNTPPCFSIYVMGLVLEWIKNNGGAAAMEKLSSIKSQTIYEIIDNSQGFYVCPVEPQNRSKMNIPFRIGNAKGDDALEKRFLDKALELNMLSLKGHRSVGGIRASLYNAVTIEDVQKLAAFMKKFLEMHQL

SEQ ID NO: 253 - protein, 370 aa, synthetic construct
MDAPRQVVNFGPGPAKLPHSVLLEIQKELLDYKGVGISVLEMSHRSSDFAKIINNTENLVRELLAVPDNYKVIFLQGGGCGQFSAVPLNLIGLKAGRCADYVVTGAWSAKAAEEAKKFGTINIVHPKLGSYTKIPDPSTWNLNPDASYVYYCANETVHGVEFDFIPDVKGAVLVCDMSSNFLSKPVDVSKFGVIFAGAQKHVGSAGVTVVIVRDDLLGFALRECPSVLEYKVQAGNSSLYNTPPCFSIYVMGLVLEWIKNNGGAAAMEKLSSIKSQTIYEIIDNSQGFYVCPVEPQNRSKMNIPFRIGNAKGDDALEKRFLDKALELNMLSLKGHRSVGGIRASLYNAVTIEDVQKLAAFMKKFLEMHQL

SEQ ID NO: 254 - protein, 370 aa, synthetic construct
MDAPRQVVNFGPGPAKLPHSVLLEIQKELLDYKGVGISVLEMSHRSSDFAKIINNTENLVRELLAVPDNYKVIFLQGGGCGQFSAVPLNLIGLKAGRCADYVVTGAWSAKAAEEAKKFGTINIVHPKLGSYTKIPDPSTWNLNPDASYVYYCANETVHGVEFDFIPDVKGAVLVCDMSSNFLSKPVDVSKFGVIFAGAQKNVGSAGVTVVIVRDDLLGFALRECPSVLEYKVQAGNSSLYNTPPCFSIYVMGLVLEWIKNNGGAAAMEKLSSIKSQTIYEIIDNSQGFYVCPVEPQNRSKMNIPFRIGNAKGDDALEKRFLDKALELNMLSLKVHRSVGGIRASLYNAVTIEDVQKLAAFMKKFLEMHQL

SEQ ID NO: 255 - protein, 370 aa, synthetic construct
MDAPRQVVNFGPGPAKLPHSVLLEIQKELLDYKGVGISVLEMSHRSSDFAKIINNTENLVRELLAVPDNYKVIFLQGGGCGQFSAVPLNLIGLKAGRCADYVVTGAWSAKAAEEAKKFGTRNIVHPKLGSYTKIPDPSTWNLNPDASYVYYCANETVHGVEFDFIPDVKGAVLVCDMSSNFLSKPVDVSKFGVIFAGAQKNVGSAGVTVVIVRDDLLGFALRECPSVLEYKVQAGNSSLYNTPPCFSIYVMGLVLEWIKNNGGAAAMEKLSSIKSQTIYEIIDNSQGFYVCPVEPQNRSKMNIPFRIGNAKGDDALEKRFLDKALELNMLSLKGHRSVGGIRASLYNAVTIEDVQKLAAFMKKFLEMHQL

SEQ ID NO: 256 - protein, 370 aa, synthetic construct
MDAPRQVVNFGPGPAKLPHSVLLEIQKELLDYKGVGISVLEMSHRSSDFAKIINNTENLVRELLAVPDNYKVIFLQGGGCGQFSAVHLNLIGLKAGRCADYVVTGAWSAKAAEEAKKFGTINIVHPKLGSYTKIPDPSTWNLNPDASYVYYCANETVHGVEFDFIPDVKGAVLVCDMSSNFLSKPVDVSKFGVIFAGAQKNVGSAGVTVVIVRDDLLGFALRECPSVLEYKVQAGNSSLYNTPPCFSIYVMGLVLEWIKNNGGAAAMEKLSSIKSQTIYEIIDNSQGFYVCPVEPQNRSKMNIPFRIGNAKGDDALEKRFLDKALELNMLSLKGHRSVGGIRASLYNAVTIEDVQKLAAFMKKFLEMHQL

SEQ ID NO: 257 - protein, 370 aa, synthetic construct
MDAPRQVVNFGPGPAKLPHSVLLEIQKELLDYKGVGISVLEMSHRSSDFAKIINNTENLVRELLAVPDNYKVIFLQGGGCGQFSAVPLNLIGLKAGRCADYVVTGAWSAKAAEEAKKFGTINIVHPKLGSYTKIPDPSTWNLNPDASYVYYCANETVHGVEFDFIPDVKGAVLVCDMSSNFLSKPVDVSKFGVIFAGAQKNVGSAGVTVVIVRDDLLGFALRECPSVLEDKVQAGNSSLYNTPPCFSIYVMGLVLEWIKNNGGAAAMEKLSSIKSQTIYEIIDNSQGFYVCPVEPQNRSKMNIPFRIGNAKGDDALEKRFLDKALELNMLSLKGHRSVGGIRASLYNAVTIEDVQKLAAFMKKFLEMHQL

SEQ ID NO: 258 - protein, 370 aa, synthetic construct
MDAPRQVVNFGPGPAKLPHSVLLEIQKELLDYKGVGISVLEMSHRSSDFAKIINNTENLVRELLAVPDNYKVIFLQGGGCGQFSAVPLNLIGLKAGRCADYVVTGAWSAKAAEEAKKFGTINIDHPKLGSYTKIPDPSTWNLNPDASYVYYCANETVHGVEFDFIPDVKGAVLVCDMSSNFLSKPVDVSKFGVIFAGAQKNVGSAGVTVVIVRDDLLGFALRECPSVLEYKVQAGNSSLYNTPPCFSIYVMGLVLEWIKNNGGAAAMEKLSSIKSQTIYEIIDNSQGFYVCPVEPQNRSKMNIPFRIGNAKGDDALEKRFLDKALELNMLSLKGHRSVGGIRASLYNAVTIEDVQKLAAFMKKFLEMHQL

SEQ ID NO: 259 - protein, 370 aa, synthetic construct
MDAPRQVVNFGPGPAKLPHSVLLEIQKELLDYKGVGISVLEMSHRSSDFAKIINNTENLVRELLAVPDNYKVIFLQGGGCGQFSAVPLNLIGLKAGRCADYVVTGAWSAKAAEEAKKFGTINIVHPKLGSYTKIPDPSTWNLNPDASYVYYCANETVHGVEFDFIPDVKGAVLVCDMSSNFLSKPVDVSKFGVIFAGAQKNVGSAGVTVVIVRDDRLGFALRECPSVLEYKVQAGNSSLYNTPPCFSIYVMGLVLEWIKNNGGAAAMEKLSSIKSQTIYEIIDNSQGFYVCPVEPQNRSKMNIPFRIGNAKGDDALEKRFLDKALELNMLSLKGHRSVGGIRASLYNAVTIEDVQKLAAFMKKFLEMHQL

SEQ ID NO: 260 - protein, 370 aa, synthetic construct
MDAPRQVVNFGPGPAKLPHSVLLEIQKELLDYKGVGISVLEMSHRSSDFAKIINNTENLVRELLAVPDNYKVIFLQGGGCGQFSAVPLNLIGLKAGRCADYVVTGAWSAKAAEEAKKFGTINIVHPKLGSYTKIPDPSTWNLNPDASYVYYCANETVHGVEFDFIPDVKGAVLVCDMSSNFLSKPVYVSKFGVIFAGAQKNVGSAGVTVVIVRDDLLGFALRECPSVLEYKVQAGNSSLYNTPPCFSIYVMGLVLEWIKNNGGAAAMEKLSSIKSQTIYEIIDNSQGFYVCPVEPQNRSKMNIPFRIGNAKGDDALEKRFLDKALELNMLSLKGHRSVGGIRASLYNAVTIEDVQKLAAFMKKFLEMHQL

SEQ ID NO: 261 - protein, 370 aa, synthetic construct
MDAPRQVVNFGPGPAKLPHSVLLEIQKELLDYKGVGISVLEMSHRSSDFAKIINNTENLVRELLAVPDNYKVIFLQGGGCGQFSAVLLNLIGLKAGRCADYVVTGAWSAKAAEEAKKFGTINIVHPKLGSYTKIPDPSTWNLNPDASYVYYCANETVHGVEFDFIPDVKGAVLVCDMSSNFLSKPVDVSKFGVIFAGAQKNVGSAGVTVVIVRDDLLGFALRECPSVLEYKVQAGNSSLYNTPPCFSIYVMGLVLEWIKNNGGAAAMEKLSSIKSQTIYEIIDNSQGFYVCPVEPQNRSKMNIPFRIGNAKGDDALEKRFLDKALELNMLSLKGHRSVGGIRASLYNAVTIEDVQKLAAFMKKFLEMHQL

SEQ ID NO: 262 - protein, 370 aa, synthetic construct
MDAPRQVVNFGPGPAKLPHSVLLEIQKELLDYKGVGISVLEMSHRSSDFAKIINNTENLVRELLAVPDNYKVIFLQGGGCGQFSAVPLNLIGLKAGRCADYVVTGAWSAKAAEEAKKFGTINIVHPKLGSYTKIPDPSTWNLNPDASYVYYCANETVHGVEFDFIPDVKGAVLVCDMSANFLSKPVDVSKFGVIFAGAQKNVGSAGVTVVIVRDDLLGFALRECPSVLEYKVQAGNSSLYNTPPCFSIYVMGLVLEWIKNNGGAAAMEKLSSIKSQTIYEIIDNSQGFYVCPVEPQNRSKMNIPFRIGNAKGDDALEKRFLDKALELNMLSLKGHRSVGGIRASLYNAVTIEDVQKLAAFMKKFLEMHQL

SEQ ID NO: 263 - protein, 370 aa, synthetic construct
MDAPRQVVNFGPGPAKLPHSVLLEIQKELLDYKGVGISVLEMSHRSSDFAKIINNTENLVRELLAVPDNYKVIFLQGGGCGQFSAVPLNLIGLKAGRCADYVVTGAWSAKAAEEAKKFGTINIVHPKLGSYTKIPDPSTWNLNPDASYVYYCANETVHGVEFDFIPDVKVAVLVCDMSSNFLSKPVDVSKFGVIFAGAQKNVGSAGVTVVIVRDDLLGFALRECPSVLEYKVQAGNSSLYNTPPCFSIYVMGLVLEWIKNNGGAAAMEKLSSIKSQTIYEIIDNSQGFYVCPVEPQNRSKMNIPFRIGNAKGDDALEKRFLDKALELNMLSLKGHRSVGGIRASLYNAVTIEDVQKLAAFMKKFLEMHQL

SEQ ID NO: 264 - protein, 370 aa, synthetic construct
MDAPRQVVNFGPGPAKLPHSVLLEIQKELLDYKGVGISVLEMSHRSSDFAKIINNTENLVRELLAVPDNYKVIFLQGGGCGQFSAVPLNLIGLKAGRCADYVVTGAWSAKAAEEAKKFGTINIVHPKLGSYTKIPDPSTWNLNPDASYVYYCANETVHGVEFDFIPDVKGAVLVCDMSSNFLSKPVDVSKFGVIFAGAQKNVGSAGVTVVIVRDDLLGFALRECPSVLEYKVQAGNSSLYNTPPCFSIYVMGLVLEWIKNNGGAAAMEKLSSIKSQTIYEIIDNSQGFCVCPVEPQNRSKMNIPFRIGNAKGDDALEKRFLDKALELNMLSLKGHRSVGGIRASLYNAVTIEDVQKLAAFMKKFLEMHQL

SEQ ID NO: 265 - protein, 370 aa, synthetic construct
MDAPRQVVNFGPGPAKLPHSVLLEIQKELLDYKGVGISVLEMSHRSSDFAKIINNTENLVRELLAVPDNYKVIFLQGGGCGQFSAVPLNLIGLKAGRCADYVVTGAWSAKAAEEAKKFGTINIVHPKLGSYTKIPDPSTWNLNPDASYVYYCANETVHGVEFDFIPDVKGAVLVCDMSSNFLSKPVDVSKFGVIFAGAQKNVGSAGVTVVIVRDDLLGFALRECPSVLEYKVQAGNSSLYNTPPCFSIYVMGLVLEWIKNNGGAAAMEKLSSIKSQTIYEIIDNSQGFYVCPVEPQNRSKMNIPFRIGNAKGDDALEKRFLDKALELNMLSLKGHRSVGGIRASLYNAVTIEDVQKLPAFMKKFLEMHQL

SEQ ID NO: 266 - protein, 370 aa, synthetic construct
MDAPRQVVNFGPGPAKLPHSVLLEIQKELLDYKGVGISVLEMSHRSSDFAKIINNTENLVRELLAVPDNYKVIFLQGGGCGQFSAVPLNLIGLKAGRCADYVVTGAWSAKAAEEAKKFGTINIVHPKLGSYTKIPDPSTWNLNPDASYVYYCANETVHGVEFDFIPDVKGAVLVCDMSSNFLSKPVDVSKFGVIFAGAQKNVGSAGVTVVIVRDDLLGFALRECPSVLEYKVQAGNSSLYNTPPCFSIYVMGLVLEWIKNNGGAAAMEKLSSIKSQTIYEIIDNSQGFYVCPMEPQNRSKMNIPFRIGNAKGDDALEKRFLDKALELNMLSLKGHRSVGGIRASLYNAVTIEDVQKLAAFMKKFLEMHQL

SEQ ID NO: 267 - protein, 370 aa, synthetic construct
MDAPRQVVNFGPGPAKLPHSVLLEIQKELLDYKGVGISVLEMSHRSSDFAKIINNTENLVRELLAVPDNYKVIFLQGGGCGQFSAVPLNLIGLKAGRCADYVVTGAWSAKAAEEAKKFGTINIVHPKLGSYTKIPDPSTWNLNPDASYVYYCANETVHGVEFDFIPDVKGAVLVCDMTSNFLSKPVDVSKFGVIFAGAQKNVGSAGVTVVIVRDDLLGFALRECPSVLEYKVQAGNSSLYNTPPCFSIYVMGLVLEWIKNNGGAAAMEKLSSIKSQTIYEIIDNSQGFYVCPVEPQNRSKMNIPFRIGNAKGDDALEKRFLDKALELNMLSLKGHRSVGGIRASLYNAVTIEDVQKLAAFMKKFLEMHQL

SEQ ID NO: 268 - protein, 370 aa, synthetic construct
MDAPRQVVNFGPGPAKLPHSVLLEIQKELLDYKGVGISVLEMSHRSSDFAKIINNTENLVRELLAVPDNYKVIFLQGGGCGQFSAVPLNLIGLKAGRCADYVVTGAWSAKAAEEAKKFGTINIVHPKLGSYTKIPDPSTWNLNPDASYVYYCANETVHGVEFDFIPDVKGAVLVCDMSSNFLSKPVDVSKFGVIFAGAQKNVGSAGVTVVIVRDDLLGFALRECPSVLEYKVQAGNSSLYNTPPCFSIYVMGLVLEWIKNNGGAAAMEKLSSIKSQTIYEIIDNSQVFYVCPVEPQNRSKMNIPFRIGNAKGDDALEKRFLDKALELNMLSLKGHRSVGGIRASLYNAVTIEDVQKLAAFMKKFLEMHQL

SEQ ID NO: 269 - protein, 370 aa, synthetic construct
MDAPRQVVNFGPGPAKLPHSVLLEIQKELLDYKGVGISVLEMSHRSSDFAKIINNTENLVRELLAVLDNYKVIFLQGGGCGQFSAVPLNLIGLKAGRCADYVVTGAWSAKAAEEAKKFGTINIVHPKLGSYTKIPDPSTWNLNPDASYVYYCANETVHGVEFDFIPDVKGAVLVCDMSSNFLSKPVDVSKFGVIFAGAQKNVGSAGVTVVIVRDDLLGFALRECPSVLEYKVQAGNSSLYNTPPCFSIYVMGLVLEWIKNNGGAAAMEKLSSIKSQTIYEIIDNSQGFYVCPVEPQNRSKMNIPFRIGNAKGDDALEKRFLDKALELNMLSLKGHRSVGGIRASLYNAVTIEDVQKLAAFMKKFLEMHQL

SEQ ID NO: 270 - protein, 370 aa, synthetic construct
MDAPRQVVNFGPGPAKLPHSVLLEIQKELLDYKGVGISVLEMSHRSSDFAKIINNTENLVRELLAVPDNYKVIFLQGGGCGQFSAVPLNLIGLKAGRCADYVVTGAWSAKAAEEAKKFGTINIVHPKLGSYTKIPDPSTWNLNPDASYVYYCANETVHGVEFDFIPDVKGAVLVCDMSSNFLSKPVDVSKFGVIFAGAQKNVGSDGVTVVIVRDDLLGFALRECPSVLEYKVQAGNSSLYNTPPCFSIYVMGLVLEWIKNNGGAAAMEKLSSIKSQTIYEIIDNSQGFYVCPVEPQNRSKMNIPFRIGNAKGDDALEKRFLDKALELNMLSLKGHRSVGGIRASLYNAVTIEDVQKLAAFMKKFLEMHQL

SEQ ID NO: 271 - protein, 370 aa, synthetic construct
MDAPRQVVNFGPGPAKLPHSVLLEIQKELLDYKGVGISVLEMSHRSSDFAKIINNTENLVRELLAVPDNYKVIFLQGGGCGQFSAVPLNLIGLKAGRCADYVVTGAWSAKAAEEAKKFGTINIVHPKLGSYTKIPDPSTLNLNPDASYVYYCANETVHGVEFDFIPDVKGAVLVCDMSSNFLSKPVDVSKFGVIFAGAQKNVGSAGVTVVIVRDDLLGFALRECPSVLEYKVQAGNSSLYNTPPCFSIYVMGLVLEWIKNNGGAAAMEKLSSIKSQTIYEIIDNSQGFYVCPVEPQNRSKMNIPFRIGNAKGDDALEKRFLDKALELNMLSLKGHRSVGGIRASLYNAVTIEDVQKLAAFMKKFLEMHQL

SEQ ID NO: 272 - protein, 370 aa, synthetic construct
MDAPRQVVNFGPGPAKLPHSVLLEIQKELLDYKGVGISVLEMSHRSSDFAKIINNTENLVRELLAVPDNYKVIFLQGGGCGQFSAVPLNLIGLKAGRCADYVVTGAWSAKAAEEAKKFGTINIVHPKLGSYTKIPDPSTWNLNPDASYVYYCATETVHGVEFDFIPDVKGAVLVCDMSSNFLSKPVDVSKFGVIFAGAQKNVGSAGVTVVIVRDDLLGFALRECPSVLEYKVQAGNSSLYNTPPCFSIYVMGLVLEWIKNNGGAAAMEKLSSIKSQTIYEIIDNSQGFYVCPVEPQNRSKMNIPFRIGNAKGDDALEKRFLDKALELNMLSLKGHRSVGGIRASLYNAVTIEDVQKLAAFMKKFLEMHQL

SEQ ID NO: 273 - protein, 370 aa, synthetic construct
MDAPRQVVNFGPGPAKLPHSVLLEIQKELLDYKGVGISVLEMSHRSSDFAKIINNTENLVRELLAVPDNYKVIFLQGGGCGQFSAVPLNLIGLKAGRCADYVVTGAWSAKAAEEAKKFGTINIVHPKLGSYTKIPDPSTWNLNPDASYVYYCANETVHGVEFDFIPDVKGAVLVCDMSSNFLSKPVDVSKFGVIFAGAQKNVGSAGVTVVIVRDDLLGFALRECPSVLEYKVQAGNSSLYNTPPCFSIYVMGLVLEWIKNNGGAAAMEKLSSIKSQTIYEIIDNSQGFYVCRVEPQNRSKMNIPFRIGNAKGDDALEKRFLDKALELNMLSLKGHRSVGGIRASLYNAVTIEDVQKLAAFMKKFLEMHQL

SEQ ID NO: 274 - protein, 370 aa, synthetic construct
MDAPRQVVNFGPGPAKLPHSVLLEIQKELLDYKGVGISVLEMSHRSSDFAKIINNTENLVRELLAVPDNYKVIFLQGGGCGQFSAVPLNLIGLKAGRCADYVVTGAWSAKAAEEAKKFGTINIVHPKLGSYTKIPDPSTWNLNPDASYVYYCANETVHGVEFDFIPDVKGAVLVCDMSSNFLSKPVDVSKFGVIFAGAQKNVGSAGVTVVIVRDDLLGFALRECPSVLEYKVQAGNSSLYNTPPCFSIYVMGLVLEWIKNNGGAAAMEKLSSIKSQTIYEIIDNSQGFYVCPEEPQNRSKMNIPFRIGNAKGDDALEKRFLDKALELNMLSLKGHRSVGGIRASLYNAVTIEDVQKLAAFMKKFLEMHQL

SEQ ID NO: 275 - protein, 370 aa, synthetic construct
MDAPRQVVNFGPGPAKLPHSVLLEIQKELLDYKGVGISVLEMSHRSSDFAKIINNTENLVRELLAVPDNYKVIFLQGGGCGQFSAVPLNLIGLKAGRCADYVVTGAWSAKAAEEAKKFGTINIVHPKLGSYTKIPDPSTWNLNPDASYVYYCANETVHGVEFDFIPDVKGAVLVCDMSSNFLSKPVDVSKFGVIFAGAQKNVGSAGVTVVIVRDDLLGFALRECPSVLEYKVQAGNSSLYNTPPCFSIYVMGLVLEWIKNNGGAAAMEKLSSIKSQTIYEIIDNSQGFYVCPVEPQNRSKMNIPFRIGNAKGDDALEKRFLDKALELNMLSLKGHRSVVGIRASLYNAVTIEDVQKLAAFMKKFLEMHQL

SEQ ID NO: 276 - protein, 370 aa, synthetic construct
MDAPRQVVNFGPGPAKLPHSVLLEIQKELLDYKGVGISVLEMSHRSSDFAKIINNTENLVRELLAVPDNYKVIFLQGGGCGQFSAVPLNLIGLKAGRCADYVVTGAWSAKAAEEAKKFGTINIVHPKLGSYTKIPDPSTWNLNPDASYVYYCANETVHGVEFDFIPDVKGAVLVCDMSSNFLSKPVDVSKFGVIFAGAQKNVGSAGVTVVIVRDDLLGFALRECPSVLEYKVQAGNSSLYNTPPCFSIYVMGLVLEWIKNNGGAAAMEKLSSIKYQTIYEIIDNSQGFYVCPVEPQNRSKMNIPFRIGNAKGDDALEKRFLDKALELNMLSLKGHRSVGGIRASLYNAVTIEDVQKLAAFMKKFLEMHQL

SEQ ID NO: 277 - protein, 370 aa, synthetic construct
MDAPRQVVNFGPGPAKLPHSVLLEIQKELLDYKGVGISVLEMSHRSSDFAKIINNTENLVRELLAVPDNYKVIFLQGGGCGQFSAVPLNLIGLKAGRCADYVVTGAWSAKAAEEAKKFGTINIVHPKLGSYTKIPDPSTWNLNPDASYVYYCANETVHGVEFDFIPDVKGAVLVCDMSSNFLSKPVDVSKFGVIFAGAQKNVGSAGVTVVIVRDDLLGFALRECPSVLEYKVQAGNSSLYNTPPCFSIYVMGLVLEWIKNNGGAAAMEKLSSIKSQTIYEIIDNSQGFYVCPVEPQNRSKMNIPFRIGNAKGDDALEKRFLDKALELNMLSLKGHRSVGGIRASLYNAVTIEDVQKLAAFTKKFLEMHQL

SEQ ID NO: 278 - protein, 370 aa, synthetic construct
MDAPRQVVNFGPGPAKLPHSVLLEIQKELLDYKGVGISVLEMSHRSSDFAKIINNTENLVRELLAVPDNYKVIFLQGGGCGQFSAVPLNLIGLKAGRCADYVVTGAWSAKAAEEAKKFGTINIVHPKLGSYTKIPDPSTWNLNPDASYVCYCANETVHGVEFDFIPDVKGAVLVCDMSSNFLSKPVDVSKFGVIFAGAQKNVGSAGVTVVIVRDDLLGFALRECPSVLEYKVQAGNSSLYNTPPCFSIYVMGLVLEWIKNNGGAAAMEKLSSIKSQTIYEIIDNSQGFYVCPVEPQNRSKMNIPFRIGNAKGDDALEKRFLDKALELNMLSLKGHRSVGGIRASLYNAVTIEDVQKLAAFMKKFLEMHQL

SEQ ID NO: 279 - protein, 370 aa, synthetic construct
MDAPRQVVNFGPGPAKLPHSVLLEIQKELLDYKGVGISVLEMSHRSSDFAKIINNTENLERELLAVPDNYKVIFLQGGGCGQFSAVPLNLIGLKAGRCADYVVTGAWSAKAAEEAKKFGTINIVHPKLGSYTKIPDPSTWNLNPDASYVYYCANETVHGVEFDFIPDVKGAVLVCDMSSNFLSKPVDVSKFGVIFAGAQKNVGSAGVTVVIVRDDLLGFALRECPSVLEYKVQAGNSSLYNTPPCFSIYVMGLVLEWIKNNGGAAAMEKLSSIKSQTIYEIIDNSQGFYVCPVEPQNRSKMNIPFRIGNAKGDDALEKRFLDKALELNMLSLKGHRSVGGIRASLYNAVTIEDVQKLAAFMKKFLEMHQL

SEQ ID NO: 280 - protein, 370 aa, synthetic construct
MDAPRQVVNFGPGPAKLPHSVLLEIQKELLDYKGVGISVLEMSHRSSDFAKIINNTENLVRELLAVPDNYKVIFLQGGGCGQFSAVPLNLIGLKAGRCADYVVTGAWSAKAAEEAKKFGTINIVHPKLGSYTKIPDPSTWNLNPDASYVYYCANETVHGVEFDFIPDVKGAVLVCDMSSNFLSKPVDVSKFGVIFAGAQKNVGSAGVTVVIVRDDLLGFALRECPSVLEYKVQAGNSSLYNTPPCFSIYVMGLVLEWIKNNGGAAAMEKLSSIKSQTIYEIIDNSQGFYVCPVEPQNRSKMNIPFRIGNAKGDDALEKRFLDKALELNMLSLKGHRSVGGIRDSLYNAVTIEDVQKLAAFMKKFLEMHQL

SEQ ID NO: 281 - protein, 370 aa, synthetic construct
MDAPRQVVNFGPGPAKLPHSVLLEIQKELLDYKGVGISVLEMSHRSSDFAKIINNTENLVRELLAVPDNYKVIFLQGGGCGQFSAVPLNLIGLKAGRCADYVVTGAWSAKAAEEAKKFGTINIVHPKLGSYTKIPDPSTRNLNPDASYVYYCANETVHGVEFDFIPDVKGAVLVCDMSSNFLSKPVDVSKFGVIFAGAQKNVGSAGVTVVIVRDDLLGFALRECPSVLEYKVQAGNSSLYNTPPCFSIYVMGLVLEWIKNNGGAAAMEKLSSIKSQTIYEIIDNSQGFYVCPVEPQNRSKMNIPFRIGNAKGDDALEKRFLDKALELNMLSLKGHRSVGGIRASLYNAVTIEDVQKLAAFMKKFLEMHQL

SEQ ID NO: 282 - protein, 370 aa, synthetic construct
MDAPRQVVNFGPGPAKLPHSVLLEIQKELLDYKGVGISVLEMSHRSSDFAKIINNTENLVRELLAVPDNYKVIFLQGGGCGQFSAVPLNLIGLKAGRCADYVVTGAWSAKAAEEAKKFGTINIVHPKLGSYTKIPDPSTWNLNPDASYVYYCANETVHGVEFDFIPDVKGAVLVCDMSSNFLSKPVDVSKFGVIFAGAQKNVGYAGVTVVIVRDDLLGFALRECPSVLEYKVQAGNSSLYNTPPCFSIYVMGLVLEWIKNNGGAAAMEKLSSIKSQTIYEIIDNSQGFYVCPVEPQNRSKMNIPFRIGNAKGDDALEKRFLDKALELNMLSLKGHRSVGGIRASLYNAVTIEDVQKLAAFMKKFLEMHQL

SEQ ID NO: 283 - protein, 370 aa, synthetic construct
MDAPRQVVNFGPGPAKLPHSVLLEIQKELLDYKGVGISVLEMSHRSSDFAKIINNTENLVRELLAVPDNYKVIFLQGGGCGQFSAVPLNLIGLKAGRCADYVVTGAWSAKAAEEAKKFGTINIVHPKLGSYTKIPDPSTWNLNPDASYVYYCANETVHGVEFDFIPDVKGAVLVCDMSSNFLSKPVDVSKFGVIFAGAQKNVGSAGVTVVIVRDDLLGFALRECPSVLEYKVQAGNSSLYNTPPCFSIYVMGLVLEWIKNNGGAAAMEKLSSIKSQTIYEIIDNSQGFYVCPVEPQNRSKMNIPFRIGNAKGDDALEKRFLDKALELNMLSLKGHRSVGGIRASLYNAVTIEDVQKLAAFMKKSLEMHQL

SEQ ID NO: 284 - protein, 370 aa, synthetic construct
MDAPRQVVNFGPGPAKLPHSVLLEIQKELLDYKGVGISVLEMSHRSSDFAKIINNTENLVRELLAVPDNYKVIFLQGGGCGQFSAVPLNLIGLKAGRCADYVVTGAWSAKAAEEAKKFGTINIVHPKLGSYTKIPDPSTWNLNPDASYVYYCANETVHGVEFDFIPDVKGAVLVCDMSSNFLSKPVDVSKFGGIFAGAQKNVGSAGVTVVIVRDDLLGFALRECPSVLEYKVQAGNSSLYNTPPCFSIYVMGLVLEWIKNNGGAAAMEKLSSIKSQTIYEIIDNSQGFYVCPVEPQNRSKMNIPFRIGNAKGDDALEKRFLDKALELNMLSLKGHRSVGGIRASLYNAVTIEDVQKLAAFMKKFLEMHQL

SEQ ID NO: 285 - protein, 370 aa, synthetic construct
MDAPRQVVNFGPGPAKLPHSVLLEIQKELLDYKGVGISVLEMSHRSSDFAKIINNTENLVRELLAVPDNYKVIFLQGGGCGQYSAVPLNLIGLKAGRCADYVVTGAWSAKAAEEAKKFGTINIVHPKLGSYTKIPDPSTWNLNPDASYVYYCANETVHGVEFDFIPDVKGAVLVCDMSSNFLSKPVDVSKFGVIFAGAQKNVGSAGVTVVIVRDDLLGFALRECPSVLEYKVQAGNSSLYNTPPCFSIYVMGLVLEWIKNNGGAAAMEKLSSIKSQTIYEIIDNSQGFYVCPVEPQNRSKMNIPFRIGNAKGDDALEKRFLDKALELNMLSLKGHRSVGGIRASLYNAVTIEDVQKLAAFMKKFLEMHQL

SEQ ID NO: 286 - protein, 370 aa, synthetic construct
MDAPRQVVNFGPGPAKLPHSVLLEIQKELLDYKGVGISVLEMSHRSSDFAKIINNTENLVRELLAVPDNYKVIFLQGGGCGQFSAGPLNLIGLKAGRCADYVVTGAWSAKAAEEAKKFGTINIVHPKLGSYTKIPDPSTWNLNPDASYVYYCANETVHGVEFDFIPDVKGAVLVCDMSSNFLSKPVDVSKFGVIFAGAQKNVGSAGVTVVIVRDDLLGFALRECPSVLEYKVQAGNSSLYNTPPCFSIYVMGLVLEWIKNNGGAAAMEKLSSIKSQTIYEIIDNSQGFYVCPVEPQNRSKMNIPFRIGNAKGDDALEKRFLDKALELNMLSLKGHRSVGGIRASLYNAVTIEDVQKLAAFMKKFLEMHQL

SEQ ID NO: 287 - protein, 370 aa, synthetic construct
MDAPRQVVNFGPGPAKLPHSVLLEIQKELLDYKGVGISVLEMSHRSSDFAKIINNTENLVRELLAVPDNYKVIFLQGGGCGQFSAVPLNLIGLKAGRCADYVVTGAWSAKAAEEAKKFGTINIVHPKLGSYTKIPDPSTWNLNPDASYVYYCANETVHGVEFDFIPDVKGAVLVCDMSSNFLSKPVDVSKFGVIFAGAQKNVGSAGVTVVIVRDDLLGFALRECPSVLEYKVQAGNSSLYNTPPCFSIYVMGLVLEWIKNNGGAAAMEKLSSIKSQTIYEIIDNSQGFYVCPVEPQNRSKMNIPFRIGNAKGDDALEKRFLDKALELNMLSLKGRRSVGGIRASLYNAVTIEDVQKLAAFMKKFLEMHQL

SEQ ID NO: 288 - protein, 370 aa, synthetic construct
MDAPRQVVNFGPGPAKLPHSVLLEIQKELLDYKGVGISVLEMSHRSSDFAKIINNTENLVRELLAVPDNYKVIFLQGGGCGQFSAVPLNLIGLKAGRCVDYVVTGAWSAKAAEEAKKFGTINIVHPKLGSYTKIPDPSTWNLNPDASYVYYCANETVHGVEFDFIPDVKGAVLVCDMSSNFLSKPVDVSKFGVIFAGAQKNVGSAGVTVVIVRDDLLGFALRECPSVLEYKVQAGNSSLYNTPPCFSIYVMGLVLEWIKNNGGAAAMEKLSSIKSQTIYEIIDNSQGFYVCPVEPQNRSKMNIPFRIGNAKGDDALEKRFLDKALELNMLSLKGHRSVGGIRASLYNAVTIEDVQKLAAFMKKFLEMHQL

SEQ ID NO: 289 - protein, 370 aa, synthetic construct
MDAPRQVVNFGPGPAKLPHSVLLEIQKELLDYKGVGISVLEMSHRSSDFAKIINNTENLVRELLAVPDNYKVIFLQGGGCGQFSAVPLNLIGLKAGRCADYVVTGAWSAKAAEEAKKFGTINIVHPKLGSYTKIPDPSTWNLNPDASYVYYCANETVHGVEFDFIPDVKGAVLVCDMSSNFLSKPVDVSKFGVIFAGAQKNVGSAGVTVVIVRDDLLGFALRECPSVLEYKVQAGNSSLYNTPPCFSIYVMGLVLEWIKNNGGAAAMEKLSSIKSQTIYEIIDNSQGFYVCQVEPQNRSKMNIPFRIGNAKGDDALEKRFLDKALELNMLSLKGHRSVGGIRASLYNAVTIEDVQKLAAFMKKFLEMHQL

SEQ ID NO: 290 - protein, 370 aa, synthetic construct
MDAPRQVVNFGPGPAKLPHSVLLEIQKELLDYKGVGISVLEMSHRSSDFAKIINNTENLVRELLAVPDNYKVIFLQGGGCGQFSAVPLNLIGLKAGRCADYVVTGAWSAKAAEEAKKFGTINIVHPKLGSYTKIPDPSTWNLNPDASYVYSCANETVHGVEFDFIPDVKGAVLVCDMSSNFLSKPVDVSKFGVIFAGAQKNVGSAGVTVVIVRDDLLGFALRECPSVLEYKVQAGNSSLYNTPPCFSIYVMGLVLEWIKNNGGAAAMEKLSSIKSQTIYEIIDNSQGFYVCPVEPQNRSKMNIPFRIGNAKGDDALEKRFLDKALELNMLSLKGHRSVGGIRASLYNAVTIEDVQKLAAFMKKFLEMHQL

SEQ ID NO: 291 - protein, 370 aa, synthetic construct
MDAPRQVVNFGPGPAKLPHSVLLEIQKELLDYKGVGISVLEMSHRSSDFAKIINNTENLVRELLAVPDNYKVIFLQGGGCGQFSAVPLNLIGLKAGRCADYVVTGAWSAKAAEEAKKFGTINIVHPKLGSYTKIPDPSTWNLNPDASYVYYCANETVHGVEFDFIPDVKGAVLVCDMSSNFLSKPVDVSKFGVIFAGAQKNVGSAGVTVVIVRDDLLGFALRECPSVLEYKVQAGNSSLYNTPPCFSIYVMGLVLEWIKNNGGAAAMEKLSSIKSQTIYEIIDNSQGFYVCPVEPQNRSKMNIPFRIGNAKGDDALEKRFPDKALELNMLSLKGHRSVGGIRASLYNAVTIEDVQKLAAFMKKFLEMHQL

SEQ ID NO: 292 - protein, 370 aa, synthetic construct
MDAPRQVVNFGPGPAKLPHSVLLEIQKELLDYKGVGISVLEMSHRSSDFAKIINNTENLVRELLAVPDNYKVIFLQGGGCGQFSAVPLNLIGLKAGRCADYVVTGAWSAKAAEEAKKFGTINIVHPKLGSYTKIPDPSTWNLNPDASYVYYCANETVHGVEFDFIPDVKGAVLVCDMSSNFLSKPVDVSKFGVIFAGAQKNVGSAGVTVVIVLDDLLGFALRECPSVLEYKVQAGNSSLYNTPPCFSIYVMGLVLEWIKNNGGAAAMEKLSSIKSQTIYEIIDNSQGFYVCPVEPQNRSKMNIPFRIGNAKGDDALEKRFLDKALELNMLSLKGHRSVGGIRASLYNAVTIEDVQKLAAFMKKFLEMHQL

SEQ ID NO: 293 - protein, 370 aa, synthetic construct
MDAPRQVVNFGPGPAKLPHSVLLEIQKELLDYKGVGISVLEMSHRSSDFAKIINNTENLVRELLAVPDNYKVIFLQGGGCGQFSAVPLNLIGLKAGRCADYVVTGAWSAKAAEEAKKFGTINIVHPKLGSYTKIPDPSTWNLNPDASYVYYCANETVHGVEFDFIPDVKGAVLVCDMSSNFLSKPVDVSKFGVIFAGAQKNVGSAGVTVVSVRDDLLGFALRECPSVLEYKVQAGNSSLYNTPPCFSIYVMGLVLEWIKNNGGAAAMEKLSSIKSQTIYEIIDNSQGFYVCPVEPQNRSKMNIPFRIGNAKGDDALEKRFLDKALELNMLSLKGHRSVGGIRASLYNAVTIEDVQKLAAFMKKFLEMHQL

SEQ ID NO: 294 - protein, 370 aa, synthetic construct
MDAPRQVVNFGPGPAKLPHSVLLEIQKELLDYKGVGISVLEMSHRSSDFAKIINNTENLVRELLAVPDNYKVIFLQGGGCGQFSAVPLTLIGLKAGRCADYVVTGAWSAKAAEEAKKFGTINIVHPKLGSYTKIPDPSTWNLNPDASYVYYCANETVHGVEFDFIPDVKGAVLVCDMSSNFLSKPVDVSKFGVIFAGAQKNVGSAGVTVVIVRDDLLGFALRECPSVLEYKVQAGNSSLYNTPPCFSIYVMGLVLEWIKNNGGAAAMEKLSSIKSQTIYEIIDNSQGFYVCPVEPQNRSKMNIPFRIGNAKGDDALEKRFLDKALELNMLSLKGHRSVGGIRASLYNAVTIEDVQKLAAFMKKFLEMHQL

SEQ ID NO: 295 - protein, 370 aa, synthetic construct
MDAPRQVVNFGPGPAKLPHSVLLEIQKELLDYKGVGISVLEMSHRSSDFAKIINNTENLVRELLAVPDNYKVIFLQGGGCGQFSAVPLNLIGLKAGRCADYVVTGAWSAKAAEEAKKFGTINIVHPKLGSYTKIPDPSTWNLNPDASYVYYCANETVHGVKFDFIPDVKGAVLVCDMSSNFLSKPVDVSKFGVIFAGAQKNVGSAGVTVVIVRDDLLGFALRECPSVLEYKVQAGNSSLYNTPPCFSIYVMGLVLEWIKNNGGAAAMEKLSSIKSQTIYEIIDNSQGFYVCPVEPQNRSKMNIPFRIGNAKGDDALEKRFLDKALELNMLSLKGHRSVGGIRASLYNAVTIEDVQKLAAFMKKFLEMHQL

SEQ ID NO: 296 - protein, 370 aa, synthetic construct
MDAPRQVVNFGPGPAKLPHSVLLEIQKELLDYKGVGISVLEMSHRSSDFAKIINNTENLVRELLAVPDNYKVIFLQGGGCGQFSAVPLNLIGLKAGRCADYVVTGAWSAKAAEEAKKFGTINIVHPKLGSYTKIPDPSTWNLNPDASYVYYCANETVHGVEFDFIPDVKGAVLVCDMSSNFLSKPVDVSKFGVIFAGAQKNVGSAGVTVVIVRDDLLGFALRECPSVLEYKVQAGNSSLYNTPPCFSIYVMGLVLEWIKNNGGAAAMEKLSSIKSQTIYEIIDNSQGFYVCPVEPQNRSKMNIPFRIGNAKGDDALEKRCLDKALELNMLSLKGHRSVGGIRASLYNAVTIEDVQKLAAFMKKFLEMHQL

SEQ ID NO: 297 - protein, 370 aa, synthetic construct
MDAPRQVVNFGPGPAKLPHSVLLEIQKELLDYKGVGISVLEMSHRSSDFAKIINNTENLVRELLAVPDNYKVIFLQGGGCGQFSAVPLNLIGLKAGRCADYVVTGAWSAKAAEEAKKFGTINIVHPKLGSYTKIPDPSTWNLNPDASYVYYCANETVHGVEFDFIPDVKGAVLVCDMSSKFLSKPVDVSKFGVIFAGAQKNVGSAGVTVVIVRDDLLGFALRECPSVLEYKVQAGNSSLYNTPPCFSIYVMGLVLEWIKNNGGAAAMEKLSSIKSQTIYEIIDNSQGFYVCPVEPQNRSKMNIPFRIGNAKGDDALEKRFLDKALELNMLSLKGHRSVGGIRASLYNAVTIEDVQKLAAFMKKFLEMHQL

SEQ ID NO: 298 - protein, 370 aa, synthetic construct
MDAPRQVVNFGPGPAKLPHSVLLEIQKELLDYKGVGISVLEMSHRSSDFAKIINNTENLVRELLAVPDNYKVIFLQGGGCGQFSAVPLNLIGLKAGRCADYVVTGAWSAKAAEEAKKFGTINIVHPKLGSYTKIPDPSTWNLNPDATYVYYCANETVHGVEFDFIPDVKGAVLVCDMSSNFLSKPVDVSKFGVIFAGAQKNVGSAGVTVVIVRDDLLGFALRECPSVLEYKVQAGNSSLYNTPPCFSIYVMGLVLEWIKNNGGAAAMEKLSSIKSQTIYEIIDNSQGFYVCPVEPQNRSKMNIPFRIGNAKGDDALEKRFLDKALELNMLSLKGHRSVGGIRASLYNAVTIEDVQKLAAFMKKFLEMHQL

SEQ ID NO: 299 - protein, 370 aa, synthetic construct
MDAPRQVVNIGPGPAKLPHSVLLEIQKELLDYKGVGISVLEMSHRSSDFAKIINNTENLVRELLAVPDNYKVIFLQGGGCGQFSAVPLNLIGLKAGRCADYVVTGAWSAKAAEEAKKFGTINIVHPKLGSYTKIPDPSTWNLNPDASYVYYCANETVHGVEFDFIPDVKGAVLVCDMSSNFLSKPVDVSKFGVIFAGAQKNVGSAGVTVVIVRDDLLGFALRECPSVLEYKVQAGNSSLYNTPPCFSIYVMGLVLEWIKNNGGAAAMEKLSSIKSQTIYEIIDNSQGFYVCPVEPQNRSKMNIPFRIGNAKGDDALEKRFLDKALELNMLSLKGHRSVGGIRASLYNAVTIEDVQKLAAFMKKFLEMHQL

SEQ ID NO: 300 - protein, 370 aa, synthetic construct
MDAPRQVVNFGPGPAKLPHSVLLEIQKELLDYKGVGISVLEMSHRSSDFAKIINNTENLVRELLAVPDNYKVIFLQGGGCGQFSAVPLNLIGLKAGRCADYVVTGAWSAKAAEEAKKFGTINIVHPKLGSYTKIPDPSTWNLNPDASYVYYCANETVHGVEFDFIPDVKGAVLVCDMSSNFLSKPVDVSKFGVIFAGAQKNVGSAGVTVVIVRDDLLGFALRECPSVLEYKVQAGNSSLYNTPPCFSIYVMGLVLEWIKNNGVAAAMEKLSSIKSQTIYEIIDNSQGFYVCPVEPQNRSKMNIPFRIGNAKGDDALEKRFLDKALELNMLSLKGHRSVGGIRASLYNAVTIEDVQKLAAFMKKFLEMHQL

SEQ ID NO: 301 - protein, 370 aa, synthetic construct
MDAPRQVVNFGPGPAKLPHSVLLEIQKELLDYKGVGISVLEMSHRSSDFAKIINNTENLVRELLAVPDNYKVIFLQGGGCGQFSAVPLNLIGLKAGRCADYVVTGAWSAKAAEEAKKFGTINIVHPKLGSYTKIPDPSTWNLNPDASYVYYCANETVHGVEFDFIPDVKGAVLVCDMSSNFLSKPVDVSKFGVIFAGAQKNVGSAGVTVVIVRDDLLGFALRECPSVLEYKVQAGNSSLYNTPPCFSIYVMGLVLEWIKNNGGAAAMEKLSSIKSQTIYEIIDNSQGFYVCAVEPQNRSKMNIPFRIGNAKGDDALEKRFLDKALELNMLSLKGHRSVGGIRASLYNAVTIEDVQKLAAFMKKFLEMHQL

SEQ ID NO: 302 - protein, 370 aa, synthetic construct
MDAPRQVVNFGPGPAKLPHSVLLEIQKELLDYKGVGISVLEMSHRSSDFAKIINNTENLVRELLAVPDNYKVIFLQGGGCGQFSAVPLNLIGLKAGRCADYVVTGAWSAKAAEEAKKFGTINIVHPKLGSYTKIPDPSTWNLNPDASYVYYCANETVHGVEFDFIPDVKGAVLVCDMSSNFLSKPVDVSKFGVIFAGAQKNVGSAGVTVVIVRDDLLGFALRECPSVLEYKVQAGNSSLYNTPPYFSIYVMGLVLEWIKNNGGAAAMEKLSSIKSQTIYEIIDNSQGFYVCPVEPQNRSKMNIPFRIGNAKGDDALEKRFLDKALELNMLSLKGHRSVGGIRASLYNAVTIEDVQKLAAFMKKFLEMHQL

SEQ ID NO: 303 - protein, 370 aa, synthetic construct
MDAPRQVVNFGPGPAKLPHSVLLEIQKELLDYKGVGISVLEMSHRSSDFAKIINNTENLVRELLAVPDNYKVIFLQGGGCGQFSAVPLNLIGLKAGRCADYVVTGAWSAKAAEEAKKFGTINIVHPKLGSYTKIPDPSTWNLNPDASYVYYCANETVHGVEFDFIPDVKGAVLVCDMSSNFLSKPVDVSKFGVIFAGAQKNVGSAGVTVVIVRDDLLGFALRECPSVLEYKVQAGNSSLYNTPPCFSIYVMGLVLEWIKNNGGAAAMEKLSSIKSQTIYEISDNSQGFYVCPVEPQNRSKMNIPFRIGNAKGDDALEKRFLDKALELNMLSLKGHRSVGGIRASLYNAVTIEDVQKLAAFMKKFLEMHQL

SEQ ID NO: 304 - protein, 370 aa, synthetic construct
MDAPRQVVNFGPGPAKLPHSVLLEIQKELLDYKGVGISVLEMSHRSSDFAKIINNTENLVRELLAVPDNYKVIFLQGGGCGQFSAVPLNLIGLKAGRCADYVVTGAWSAKAAEEAKKFGTINIVHPKLGSYTKIPDPSTWNLNPDASYVYYCANETVHGVEFDFILDVKGAVLVCDMSSNFLSKPVDVSKFGVIFAGAQKNVGSAGVTVVIVRDDLLGFALRECPSVLEYKVQAGNSSLYNTPPCFSIYVMGLVLEWIKNNGGAAAMEKLSSIKSQTIYEIIDNSQGFYVCPVEPQNRSKMNIPFRIGNAKGDDALEKRFLDKALELNMLSLKGHRSVGGIRASLYNAVTIEDVQKLAAFMKKFLEMHQL

SEQ ID NO: 305 - protein, 370 aa, synthetic construct
MDAPRQVVNFGPGPAKLPHSVLLEIQKELLDYKGVGISVLEMSHRSSDFAKIINNTENLVRELLAVPDNYKVIFLQGGGCGQFSAVPLNLIGLKAGRCADYVVTGAWSAKAAEEAKKFGTINIVHPKLGSYTKIPDPSTWNLNPDASYVYYCANETVHGVEFDFIPDVKGAVLVCDMSSNFLSKPVDVSKFGVIFAGAQKNVGSAGVTVVIVRDDLLGFALRECPSVLEYKVQAGNSSLYNTPPCFSIYVMGLVLEWIKNNGGAAAMEKLSSIKSQTIYEIIDNSQGFYVCPVEPQNRSKMNIPFRIGNAKGDDALEKRFLDKALELNMLSLKGHRSVGGIRASLYNAVTIEDVQKLAAFMKKCLEMHQL

SEQ ID NO: 306 - protein, 370 aa, synthetic construct
MDAPRQVVNFGPGPAKLPHSVLLEIQKELLDYKGVGISVLEMSHRSSDFAKIINNTENLVRELLAVPDNYKVIFLQGGGCGQFSAVPLNLIGLKAGRCADYVVTGAWSAKAAEEAKKFGTINIVHPKLGSYTKIPDPSTWNLNPDASYVYYCANETVHGVEFDFIPDVKGAVLVCDMSSNFLSKPVDVSKFGVIFAGAQKNVGSAGVTVVIVRDDLLGFALRECPSVLEYKVQAGNSSLYNTPPCFSIYVMGLVLEWIKNNGGAAAMEKLSSIKSQTIYEIIDNSQGCYVCPVEPQNRSKMNIPFRIGNAKGDDALEKRFLDKALELNMLSLKGHRSVGGIRASLYNAVTIEDVQKLAAFMKKFLEMHQL

SEQ ID NO: 307 - protein, 370 aa, synthetic construct
MDAPRQVVNFGPGPAKLPHSVLLEIQKELLDYKGVGISVLEMSHRSSDFAKIINNTENLVRELLAVPDNYKVIFLQGGGCGQFSAVPLNLIGLKAGRCADYVVTGAWSAKAAEEAKKFGTINIVHPKLGSYTKIPDPSTWNLNPDASYVYYCANETVHGVEFDFIPDVKGAVLVCDMSSNFLSKPVDVSKFGVIFAGAQKNVGSAGVTVVIVRDDLLGFALRECPSVLEYKVQAGNSSLYNTPPCFSIYVMGLVLEWIKNNGGAAAMEKLSSIKSQTIYEIIDNSQGFYVCPVEPQNRSKMNIPFRIGNAKGDDALEKRFLDKALELNMLSLKGHRSVGSIRASLYNAVTIEDVQKLAAFMKKFLEMHQL

SEQ ID NO: 308 - protein, 370 aa, synthetic construct
MDAPRQVVNFGPGPAKLPHSVLLEIQKELLDYKGVGISVLEMSHRSSDFAKIINNTENLVRELLAVPDNYKVIFLQGGGCGQFSAVPLNLIGLKAGRCADYVVTGAWSAKAAEEAKKFGTINIVHPKLGSYTKIPDPSTWNLNPDASYVYYCANETVHGVEFDFITDVKGAVLVCDMSSNFLSKPVDVSKFGVIFAGAQKNVGSAGVTVVIVRDDLLGFALRECPSVLEYKVQAGNSSLYNTPPCFSIYVMGLVLEWIKNNGGAAAMEKLSSIKSQTIYEIIDNSQGFYVCPVEPQNRSKMNIPFRIGNAKGDDALEKRFLDKALELNMLSLKGHRSVGGIRASLYNAVTIEDVQKLAAFMKKFLEMHQL

SEQ ID NO: 309 - protein, 370 aa, synthetic construct
MDAPRQVVNFGPGPAKLPHSVLLEIQKELLDYKGVGISVLEMSHRSSDFAKIINNTENLVRELLAVPDNYKVIFLQGGGCGQFSAVPLNLIGLKAGRCADYVVTGAWSAKAAEEAKKFGTINIVHPKLGSYTKIPDPSTWNLNPDASYVYYCANETVHGVEFDFIPDVKGAVLVCDMSSNFLSKPVDVSKFGVIFAGAQKNVGSAGVTVVIVRDDLLGFALRECPSVLEYKVQAGNSSLYNTPPCFSIYVMGLVLEWIKNNGGAAAMEKLSSIKSQTIYEITDNSQGFYVCPVEPQNRSKMNIPFRIGNAKGDDALEKRFLDKALELNMLSLKGHRSVGGIRASLYNAVTIEDVQKLAAFMKKFLEMHQL

SEQ ID NO: 310 - protein, 370 aa, synthetic construct
MDAPRQVVNFGPGPAKLPHSVLLEIQKELLDYKGVGISVLEMSHRSSDFAKIINNTENLVRELLAVPDNYKVIFLQGGGCGQFSAVPLNLIGLKAGRCADYVVTGAWSAKAAEEAKKFGTINIVHPKLGSYTKIPDPSTWNLNPDASYVYYCANETVHGVEFDFIPDVKGAVLVCDMSSNFLSKPVDVSKFGVIFAGAQKNVGSAGVTVVIVRDDLLGFALRECPSVLEYKVQAGNSSLYNTPPCFSIYVMGLVLEWIKNNGGAAAMEKLSSIKSQTIYEIIDNSQGFYVCSVEPQNRSKMNIPFRIGNAKGDDALEKRFLDKALELNMLSLKGHRSVGGIRASLYNAVTIEDVQKLAAFMKKFLEMHQL

SEQ ID NO: 311 - protein, 370 aa, synthetic construct
MDAPRQVVNFGPGPAKLPHSVLLEIQKELLDYKGVGISVLEMSHRSSDFAKIINNTENLVRELLAVPDNYKVIFLQGGGCGQFSAVPLNLIGLKAGRCADYVVTGAWSAKAAEEAKKFGTINIVHPKLGSYTKIPDPSTWNLNPDASYVYYCANETVHGVEFDFIPDVKGAVLVCDMSSNFLSKPVDVSKFGVIFAGAQKNVGSAGVTVVIVRDDLLGFALRECPSVLEYKVQAGNSSLYNTPPCFSIYVMGLVLEWIKNNGGAAAMEKLSSIKSQTIYEIIDNSQGFYVCPVEPQNRSKMNFPFRIGNAKGDDALEKRFLDKALELNMLSLKGHRSVGGIRASLYNAVTIEDVQKLAAFMKKFLEMHQL

SEQ ID NO: 312 - protein, 370 aa, synthetic construct
MDAPRQVVNFGPGPAKLPHSVLLEIQKELLDYKGVGISVLEMSHRSSDFAKIINNTENLVRELLAVPDNYKVIFLQGGGCGQFSAVPLNLIGLKAGRCADYVVTGAWSAKAAEEAKKFGTINIVHPKLGSYTKIPDPSTWNLNPDASYVYYCANETVHGVVFDFIPDVKGAVLVCDMSSNFLSKPVDVSKFGVIFAGAQKNVGSAGVTVVIVRDDLLGFALRECPSVLEYKVQAGNSSLYNTPPCFSIYVMGLVLEWIKNNGGAAAMEKLSSIKSQTIYEIIDNSQGFYVCPVEPQNRSKMNIPFRIGNAKGDDALEKRFLDKALELNMLSLKGHRSVGGIRASLYNAVTIEDVQKLAAFMKKFLEMHQL

SEQ ID NO: 313 - protein, 370 aa, synthetic construct
MDAPRQVVNFGPGPAKLPHSVLLEIQKELLDYKGVGISVLEMSHRSSDFAKIINNTENLVRELLAVPDNYKVIFLQGGGCGQFSAVPLNLIGLKAGRCADYVVTGAWSAKAAEEAKKFGTINIVHPKLGSYTKIPDPSTWNLNPDASYVYYCANETVHGVEFDFIPDVKGAVLVCDMSSNFLSKPVDVSKFGVIFAGAQKNVGSAGVTVVIVRDDLLGFALRECPSVLEYKVQAGNSSLYNTPPCFSIYVMGLVLEWIKNNGGAAAMEKLSSIKSQTTYEIIDNSQGFYVCPVEPQNRSKMNIPFRIGNAKGDDALEKRFLDKALELNMLSLKGHRSVGGIRASLYNAVTIEDVQKLAAFMKKFLEMHQL

SEQ ID NO: 314 - protein, 370 aa, synthetic construct
MDAPRQVVNFGPGPAKLPHSVLLEIQKELLDYKGVGISVLEMSHRSSDFAKIINNTENLVRELLAVPDNYKVIFLQGGGCGQFSAVPLNLIGLKAGRCADYVVTGAWSAKTAEEAKKFGTINIVHPKLGSYTKIPDPSTWNLNPDASYVYYCANETVHGVEFDFIPDVKGAVLVCDMSSNFLSKPVDVSKFGVIFAGAQKNVGSAGVTVVIVRDDLLGFALRECPSVLEYKVQAGNSSLYNTPPCFSIYVMGLVLEWIKNNGGAAAMEKLSSIKSQTIYEIIDNSQGFYVCPVEPQNRSKMNIPFRIGNAKGDDALEKRFLDKALELNMLSLKGHRSVGGIRASLYNAVTIEDVQKLAAFMKKFLEMHQL

SEQ ID NO: 315 - protein, 370 aa, synthetic construct
MDAPRQVVNFGPGPAKLPHSVLLEIQKELLDYKGVGISVLEMSHRSSDFAKIINNTENLVRELLAVPDNYKVIFLQGGGCGQFSAVPLNLIGLKAGRCADYVVTGAWSAKAAEEAKKFGTINIVHPKLGSYTKIPDPSTWNLNPDASYVYYCANETVHGVEFDFIPDVKGAVLVCDMSSNFLSKPVDVSKFGVIFAVAQKNVGSAGVTVVIVRDDLLGFALRECPSVLEYKVQAGNSSLYNTPPCFSIYVMGLVLEWIKNNGGAAAMEKLSSIKSQTIYEIIDNSQGFYVCPVEPQNRSKMNIPFRIGNAKGDDALEKRFLDKALELNMLSLKGHRSVGGIRASLYNAVTIEDVQKLAAFMKKFLEMHQL

SEQ ID NO: 316 - protein, 370 aa, synthetic construct
MDAPRQVVNFGPGPAKLPHSVLLEIQKELLDYKGVGISVLEMSHRSSDFAKIINNTENLVRELLAVPDNYKVIFLQGGGCGQFSAVPLNLIGLKAGRCADYVVTGAWSAKAAEEAKKFGTINIVHPKLGSYTKIPDPSTWNLNPDASYVYYCPNETVHGVEFDFIPDVKGAVLVCDMSSNFLSKPVDVSKFGVIFAGAQKNVGSAGVTVVIVRDDLLGFALRECPSVLEYKVQAGNSSLYNTPPCFSIYVMGLVLEWIKNNGGAAAMEKLSSIKSQTIYEIIDNSQGFYVCPVEPQNRSKMNIPFRIGNAKGDDALEKRFLDKALELNMLSLKGHRSVGGIRASLYNAVTIEDVQKLAAFMKKFLEMHQL

SEQ ID NO: 317 - protein, 370 aa, synthetic construct
MDAPRQVVNFGPGPAKLPHSVLLEIQKELLDYKGVGISVLEMSHRSSDFAKIINNTENLVRELLAVPDNYKVIFLQGGGCGQFSAVPLNLIGLKAGRCADYVVTGAWSAKAAEEAKKFGTINIVHPKLGSYTKIPDPSTWNLNPDASYVYYCANETVHGVEFDFIHDVKGAVLVCDMSSNFLSKPVDVSKFGVIFAGAQKNVGSAGVTVVIVRDDLLGFALRECPSVLEYKVQAGNSSLYNTPPCFSIYVMGLVLEWIKNNGGAAAMEKLSSIKSQTIYEIIDNSQGFYVCPVEPQNRSKMNIPFRIGNAKGDDALEKRFLDKALELNMLSLKGHRSVGGIRASLYNAVTIEDVQKLAAFMKKFLEMHQL

SEQ ID NO: 318 - protein, 370 aa, synthetic construct
MDAPRQVVNFGPGPAKLPHSVLLEIQKELLDYKGVGISVLEMSHRSSDFAKIINNTENLVRELLAVPDNYKVIFLQGGGCGQFSAVPLNLIGLKAGRCADYVVTGAWSAKAAEEAKKFGTINIVHPKLGSYTKIPDPSTWNLNPDASYVYYCANETVHGVEFDFIPDVKGAVLVCDMSSNFLSKPVDVSKFGVIFAGAQKNVGSAGVTVVIVRDDLLGFALRECPSVLEYKVQAGNSSLYNTPPFFSIYVMGLVLEWIKNNGGAAAMEKLSSIKSQTIYEIIDNSQGFYVCPVEPQNRSKMNIPFRIGNAKGDDALEKRFLDKALELNMLSLKGHRSVGGIRASLYNAVTIEDVQKLAAFMKKFLEMHQL

SEQ ID NO: 319 - protein, 370 aa, synthetic construct
MDAPRQVVNFGPGPAKLPHSVLLEIQKELLDYKGVGISVLEMSHRSSDFAKIINNTENLVRELLAVPDNYKVIFLQGGGCGQFSAVPLNLIGLKAGRCADYVVTGAWSAKAAEEAKKFGTINIVHPKLGSYTKIPDPSTWNLNPDASYVYYCANETVHGVEFDFIPDVKGAVLVCDMSSNFLSKPVDVSKFGVIFAGAQKNVGSAGVTVVIVCDDLLGFALRECPSVLEYKVQAGNSSLYNTPPCFSIYVMGLVLEWIKNNGGAAAMEKLSSIKSQTIYEIIDNSQGFYVCPVEPQNRSKMNIPFRIGNAKGDDALEKRFLDKALELNMLSLKGHRSVGGIRASLYNAVTIEDVQKLAAFMKKFLEMHQL

SEQ ID NO: 320 - protein, 370 aa, synthetic construct
MDAPRQVVNFGPGPAKLPHSVLLEIQKELLDYKGVGISVLEMSHRSSDFAKIINNTENLVRELRAVPDNYKVIFLQGGGCGQFSAVPLNLIGLKAGRCADYVVTGAWSAKAAEEAKKFGTINIVHPKLGSYTKIPDPSTWNLNPDASYVYYCANETVHGVEFDFIPDVKGAVLVCDMSSNFLSKPVDVSKFGVIFAGAQKNVGSAGVTVVIVRDDLLGFALRECPSVLEYKVQAGNSSLYNTPPCFSIYVMGLVLEWIKNNGGAAAMEKLSSIKSQTIYEIIDNSQGFYVCPVEPQNRSKMNIPFRIGNAKGDDALEKRFLDKALELNMLSLKGHRSVGGIRASLYNAVTIEDVQKLAAFMKKFLEMHQL

SEQ ID NO: 321 - protein, 370 aa, synthetic construct
MDAPRQVVNFGPGPAKLPHSVLLEIQKELLDYKGVGISVLEMSHRSSDFAKIINNTENLVRELLAVPDNYKVIFLQGGGCGQFSAVPLNLIGLKAGRCADYVVTGAWSAKAAEEAKKFGTINIVHPKLGSYTKIPDPSTWNLNPDASYVYYCANETVHGVEFDFIPDVKGAVLVCDMSSNFLSKPVDVSKFGVIFAGAQKNVGSAGVTVVIVRDDLLGFALRECPSVLEYKVQAGNSSLYNTPPCFSIYVMGLVLEWIKNNGGAAAMEKLSSIKSQTIYEIIDNSQGFYVCPVEPQNRSKMNIPFRIGNAKGDDALEKRFLDKALELNMLSLKGHRSVGGIRASLYNAVTIEDVQKLAAFVKKFLEMHQL

SEQ ID NO: 322 - protein, 370 aa, synthetic construct
MDAPRQVVNFGPGPAKLPHSVLLEIQKELLDYKGVGISVLEMSHRSSDFAKIINNTENLVRELLAVPDNYKVIFLQGGGCGQFSAVPLNLIGLKAGRCADYVVTGAWSAKAAEEAKKFGTINIVHPKLGSYTKIPDPSTWNLNPDASYVYYCANETVHGVEFDFIPDVKGAVLVCDMSSNFLSKPVDVSKFGVIFAGAQKNVGSAGVTVVIVRDDLLGFALRECPSVLEYKVQAGNSSLYNTPPCFSIYVMGLVLEWIKNNGGAAAMEKLSSIKSQTIYEIIDNSQGFYVCPVEPQNRSKMNIPFRIGNAKGDDALEKRFLDKALELNMLSLKGQRSVGGIRASLYNAVTIEDVQKLAAFMKKFLEMHQL

SEQ ID NO: 323 - protein, 370 aa, synthetic construct
MDAPRQVVNFGPGPAKLPHSVLLEIQKELLDYKGVGISVLEMSHRSSDFAKIINNTENLVRELLAVPDNYKVIFLQGGGCGQFSAVPLNLIGLKAGRCADYVVRGAWSAKAAEEAKKFGTINIVHPKLGSYTKIPDPSTWNLNPDASYVYYCANETVHGVEFDFIPDVKGAVLVCDMSSNFLSKPVDVSKFGVIFAGAQKNVGSAGVTVVIVRDDLLGFALRECPSVLEYKVQAGNSSLYNTPPCFSIYVMGLVLEWIKNNGGAAAMEKLSSIKSQTIYEIIDNSQGFYVCPVEPQNRSKMNIPFRIGNAKGDDALEKRFLDKALELNMLSLKGHRSVGGIRASLYNAVTIEDVQKLAAFMKKFLEMHQL

SEQ ID NO: 324 - protein, 370 aa, synthetic construct
MDAPRQVVNFGPGPAKLPHSVLLEIQKELLDYKGVGISVLEMSHRSSDFAKIINNTENLVRELLAVPDNYKVIFLQGGGCGQFSAVPLNLIGLKAGRCADYVVTGAWSAKAAEEAKKFGTINIVHPKLGSYTKIPDPSTWNLNPDASYVYYCANETVHGVEFDFIPDVKGAVLVCDMSSNFLSKPVDVSKFGVIFAGAQKNVGSAGVTVVIVRDDLLGFALRECPSVLEYKVQAGNSSLYNTPPCFSIYVMGLVLEWIKNNGGAAAMEKLSSIKSQTIYEIIDNSQGFYVCPVEPQNRSKMNIPFRIGNAKGDDALEKRFLDKALELNMLSLKGNRSVGGIRASLYNAVTIEDVQKLAAFMKKFLEMHQL

SEQ ID NO: 325 - protein, 370 aa, synthetic construct
MDAPRQVVNFGPGPAKLPHSVLLEIQKELLDYKGVGISVLEMSHRSSDFAKIINNTENLVRELLAVPDNYKVIFLQGGGCGQFSAVPLNLIGLKAGRCADYVVTGAWSAKAAEEAKKFGTINIVHPKLGSYTKIPDPSTWNLNPDASYVYYCANETVHGVEFDFIPDVKGAVLVCDMSSNFLSKPVDVSKFGVIFAGAQKNVGSAGVTVVIVRDDLLGFALRECPSVLEYKVQAGNSSLYNTPPCFSIYVMGLVLEWIKNNGGAAAMEKLSSIKSQTIYEIIDNSQGFYVCPVEPQNRSKMNIPFRIGNAKGDDALEKRFLDKALELNMLSLKGHRSVGGIRAPLYNAVTIEDVQKLAAFMKKFLEMHQL

SEQ ID NO: 326 - protein, 370 aa, synthetic construct
MDAPRQVVNFGPGPAKLPHSVLLEIQKELLDYKGVGISVLEMSHRSSDFAKIINNTENLVRELLAVPDNYKVIFLQGGGCGQFSAVPLNLIGLKAGRCADYVVTGAWSAKAAEEAKKFGTINIVHPKLGSYTKIPDPSTWNLNPDASYVYYCANETVHGVEFDFIPDVKGAVLVCDMSSNFLSKPVDVSKFGVIFAGAQKNVGSAGVTVVIVRDDLLGFALRECPSVLEYKVQAGNSSLYNTPPCFSIYVMGLVLEWIKNNGGAAAMEKLSSIKSQTIYEIIDNCQGFYVCPVEPQNRSKMNIPFRIGNAKGDDALEKRFLDKALELNMLSLKGHRSVGGIRASLYNAVTIEDVQKLAAFMKKFLEMHQL

SEQ ID NO: 327 - protein, 370 aa, synthetic construct
MDAPRQVVNFGPGPAKLPHSVLLEIQKELLDYKGVGISVLEMSHRSSDFAKIINNTENLVRELLAVPDNYKVIFLQGGGCGQFSAVPLNLIGLKAGRCADYVVTGAWSAKAAEEAKKFGTINIVHPKLGSYTKIPDPSTWNLNPDASYVYYCANETVHGVEFDFISDVKGAVLVCDMSSNFLSKPVDVSKFGVIFAGAQKNVGSAGVTVVIVRDDLLGFALRECPSVLEYKVQAGNSSLYNTPPCFSIYVMGLVLEWIKNNGGAAAMEKLSSIKSQTIYEIIDNSQGFYVCPVEPQNRSKMNIPFRIGNAKGDDALEKRFLDKALELNMLSLKGHRSVGGIRASLYNAVTIEDVQKLAAFMKKFLEMHQL

SEQ ID NO: 328 - protein, 370 aa, synthetic construct
MDAPRQVVNFGPGPAKLPHSVLLEIQKELLDYKGVGISVLEMSHRSSDFAKIINNTENLVRELLAVPDNYKVIFLQGGGCGQFSAVPLNLIGLKAGRCADYVVTGAWSAKAAEEAKKFGTINIVHPKLGSYTKIPDPSTWNLNPDASYVYYCANETVHGVEFDFIPDVKGAVLVCDMSSNFLSKPVDVSKFGVIFAGAQKNVGSAGVTVVIVRDDPLGFALRECPSVLEYKVQAGNSSLYNTPPCFSIYVMGLVLEWIKNNGGAAAMEKLSSIKSQTIYEIIDNSQGFYVCPVEPQNRSKMNIPFRIGNAKGDDALEKRFLDKALELNMLSLKGHRSVGGIRASLYNAVTIEDVQKLAAFMKKFLEMHQL

SEQ ID NO: 329 - protein, 370 aa, synthetic construct
MDAPRQVVNFGPGPAKLPHSVLLEIQKELLDYKGVGISVLEMSHRSSDFAKIINNTENLVRELLAVPDNYKVIFLQGGGCGQFSAVPLNLIGLKAGRCADYVVTGAWSAKAAEEAKKFGTINIVHPKLGSYTKIPDPSTWNLNPDASYVYYCANETVHGVEFDFIPDVKGAVLVCDMSSNFLSKPVDVSKFGVIFAGAQKNVGSAGVTVVIVRDDLLGFALRECPSVLEYKVQAGNSSLYNTPPCFSIYVMGLVLEWIKNNGGAAAMEKLSSIKSQTIYEIIDNSQGFYVCPVEPQNRSKMNIPFRIGNAKGDDALEKRILDKALELNMLSLKGHRSVGGIRASLYNAVTIEDVQKLAAFMKKFLEMHQL

SEQ ID NO: 330 - protein, 370 aa, synthetic construct
MDAPRQVVNFGPGPAKLPHSVLLEIQKELLDYKGVGISVLEMSHRSSDFAKIINNTENLVRELLAVPDNYKVIFLQGGGCGQFSAVPLNLIGLKAGRCADYVVTGAWSAKAAEEAKKFGTINIVHPKLGSYTKIPDPSTGNLNPDASYVYYCANETVHGVEFDFIPDVKGAVLVCDMSSNFLSKPVDVSKFGVIFAGAQKNVGSAGVTVVIVRDDLLGFALRECPSVLEYKVQAGNSSLYNTPPCFSIYVMGLVLEWIKNNGGAAAMEKLSSIKSQTIYEIIDNSQGFYVCPVEPQNRSKMNIPFRIGNAKGDDALEKRFLDKALELNMLSLKGHRSVGGIRASLYNAVTIEDVQKLAAFMKKFLEMHQL

SEQ ID NO: 331 - protein, 370 aa, synthetic construct
MDAPRQVVNFGPGPAKLPHSVLLEIQKELLDYKGVGISVLEMSHRSSDFAKIINNTENLVRELLAVPDNYKVIFLQGGGCGQFSAVPLNLIGLKAGRCADYVVTGAWSAKAAEEAKKFGTINIVHPKLGSYTKIPDPSTWNLNPDASYVYYCANETVHGVEFDFIPDVKGAVLVCDMSSNFLSKPVDVSKFGVIFAGAQKNVGSAGVTVVIVRDDLLGFALRECPSVLEYKVQAGNSSLYNTPPCFSIYVMGLVLEWIKNNGGAAAMEKLSSIKSQTIYEIIDNSQGFYVCPVEPQNRSKMNIPFRIGNAKGDDALEKRFLDKALELNMLSLKGHRSEGGIRASLYNAVTIEDVQKLAAFMKKFLEMHQL

SEQ ID NO: 332 - protein, 370 aa, synthetic construct
MDAPRQVVNFGPGPAKLPHSVLLEIQKELLDYKGVGISVLEMSHRSSDFAKIINNTENLVRELLAVPDNYKVIFLQGGGCGQFSAVPLNLIGLKAGRCADYVVTGAWSAKAAEEAKKFGTINIVHPKLGSYTKIPDPSTWNLNPDASYVYYCANETVHGVEFDFIPDVKGAVLVCDMSSNFLSKPVDVSKFGVIFAGAQKNVGSAVVTVVIVRDDLLGFALRECPSVLEYKVQAGNSSLYNTPPCFSIYVMGLVLEWIKNNGGAAAMEKLSSIKSQTIYEIIDNSQGFYVCPVEPQNRSKMNIPFRIGNAKGDDALEKRFLDKALELNMLSLKGHRSVGGIRASLYNAVTIEDVQKLAAFMKKFLEMHQL

SEQ ID NO: 333 - protein, 370 aa, synthetic construct
MDAPRQVVNFGPGPAKLPHSVLLEIQKELLDYKGVGISVLEMSHRSSDFAKIINNTENLVRELLAFPDNYKVIFLQGGGCGQFSAVPLNLIGLKAGRCADYVVTGAWSAKAAEEAKKFGTINIVHPKLGSYTKIPDPSTWNLNPDASYVYYCANETVHGVEFDFIPDVKGAVLVCDMSSNFLSKPVDVSKFGVIFAGAQKNVGSAGVTVVIVRDDLLGFALRECPSVLEYKVQAGNSSLYNTPPCFSIYVMGLVLEWIKNNGGAAAMEKLSSIKSQTIYEIIDNSQGFYVCPVEPQNRSKMNIPFRIGNAKGDDALEKRFLDKALELNMLSLKGHRSVGGIRASLYNAVTIEDVQKLAAFMKKFLEMHQL

SEQ ID NO: 334 - protein, 370 aa, synthetic construct
MDAPRQVVNFGPGPAKLPHSVLLEIQKELLDYKGVGISVLEMSHRSSDFAKIINNTENLVRELLAVPDNYKVIFLQGGGCGQFSAVPLNLIGLKAGRCADYVVTGAWSAKAAEEAKKFGTINIVHPKLGSYTKIPDPSTWNLNPDASYVYYCANETVHGVEFDFIPDVKGAVLVCDMSSNFLSKPVDVSKFGVIFAGAQKNVGSAGVTVVIVRDDLLGFALRECPSVPEYKVQAGNSSLYNTPPCFSIYVMGLVLEWIKNNGGAAAMEKLSSIKSQTIYEIIDNSQGFYVCPVEPQNRSKMNIPFRIGNAKGDDALEKRFLDKALELNMLSLKGHRSVGGIRASLYNAVTIEDVQKLAAFMKKFLEMHQL

SEQ ID NO: 335 - protein, 370 aa, synthetic construct
MDAPRQVVNFGPGPAKLPHSVLLEIQKELLDYKGVGISVLEMSHRSSDFAKIINNTENLVRELLAVPDNYKVIFLQGGGCGQFSAVPLNLIGLKAGRCADYVVTGAWSAKAAEEAKKFGTINIVHPKLGSYTKIPDPSTWNLNPDASYVYYCANETVHGVEFDFIPDVKGAVLVCDMSSNFLSKPVDVSKFGVIFAGAQKNVGSAGVTVVIVRDDLLGFALRECPSVLEYKVQAGNSSLYNTPPCFSIYVMGLVLEWIKNNGGAAAMEKLSSIKSQTIYEIIDNSQGFYVCPVEPQNRSKMNIPFRIGNAKGDDALEKRFLDKALELNMLSLKGHRSVGGIRASLYNAVTIEDVQKLAAFMKKVLEMHQL

SEQ ID NO: 336 - protein, 370 aa, synthetic construct
MDAPRQVVNFGPGPAKLPHSVLLEIQKELLDYKGVGISVLEMSHRSSDFAKIINNTENLVRELLAVPDNYKVIFLQGGGCGQFSAVPLNLIGLKAGRCADYVVTGAWSAKAAEEAKKFGTINIVHPKLGSYTKIPDPSTWNLNPDASYVYYCANETVHGVEFDFIPDVKGAVLVCDMSSNFLSKPVDVSKFGVISAGAQKNVGSAGVTVVIVRDDLLGFALRECPSVLEYKVQAGNSSLYNTPPCFSIYVMGLVLEWIKNNGGAAAMEKLSSIKSQTIYEIIDNSQGFYVCPVEPQNRSKMNIPFRIGNAKGDDALEKRFLDKALELNMLSLKGHRSVGGIRASLYNAVTIEDVQKLAAFMKKFLEMHQL

SEQ ID NO: 337 - protein, 370 aa, synthetic construct
MDAPRQVVNFGPGPAKLPHSVLLEIQKELLDYKGVGISVLEMRHRSSDFAKIINNTENLVRELLAVPDNYKVIFLQGGGCGQFSAVPLNLIGLKAGRCADYVVTGAWSAKAAEEAKKFGTINIVHPKLGSYTKIPDPSTWNLNPDASYVYYCANETVHGVEFDFIPDVKGAVLVCDMSSNFLSKPVDVSKFGVIFAGAQKNVGSAGVTVVIVRDDLLGFALRECPSVLEYKVQAGNSSLYNTPPCFSIYVMGLVLEWIKNNGGAAAMEKLSSIKSQTIYEIIDNSQGFYVCPVEPQNRSKMNIPFRIGNAKGDDALEKRFLDKALELNMLSLKGHRSVGGIRASLYNAVTIEDVQKLAAFMKKFLEMHQL

SEQ ID NO: 338 - protein, 370 aa, synthetic construct
MDAPRQVVNFGPGPAKLPHSVLLEIQKELLDYKGVGISVLEMSHRSSDFAKIINNTENLVRELLAVPDNYKVIFLQGGGCGQFSAVPLNLIGLKAGRCADYVVTGAWSAKAAEEAKKFGTINIVHPKLGSYTKIPDPSTWNLNPDASYVYYCANETVHGVEFDFIPDVKGAVLVCDMSSNFLSKPVDVSKFGVIFAGAQKNVGSAGVTVVIVRDDLLGFALRECPSVLEYKVPAGNSSLYNTPPCFSIYVMGLVLEWIKNNGGAAAMEKLSSIKSQTIYEIIDNSQGFYVCPVEPQNRSKMNIPFRIGNAKGDDALEKRFLDKALELNMLSLKGHRSVGGIRASLYNAVTIEDVQKLAAFMKKFLEMHQL

SEQ ID NO: 339 - protein, 370 aa, synthetic construct
MDAPRQVVNFGPGPAKLPHSVLLEIQKELLDYKGVGISVLEMSHRSSDFAKIINNTENLVRELLAVPDNYKVIFLQGGGCGQFSAVPLNLIGLKAGRCADYVVTGAWSAKAAEEAKKFGTINIVHPKLGSYTKIPDPSTCNLNPDASYVYYCANETVHGVEFDFIPDVKGAVLVCDMSSNFLSKPVDVSKFGVIFAGAQKNVGSAGVTVVIVRDDLLGFALRECPSVLEYKVQAGNSSLYNTPPCFSIYVMGLVLEWIKNNGGAAAMEKLSSIKSQTIYEIIDNSQGFYVCPVEPQNRSKMNIPFRIGNAKGDDALEKRFLDKALELNMLSLKGHRSVGGIRASLYNAVTIEDVQKLAAFMKKFLEMHQL

SEQ ID NO: 340 - protein, 370 aa, synthetic construct
MDAPRQVVNFGPGPAKLPHSVLLEIQKELLDYKGVGISVLEMSHRSSDFAKIINNTENLVRELLAVPDNYKVIFLQGGGCGQFSAVPLNLIGLKAGRCADYVVTGAWSAKAAEEAKKFGTINIVHPKLGSYTKIPDPSTWNLNPDASYVYYCANETVHGVEFDFIPDVKGAVLVCDMSSNFLSKPVDVSKFGVIFAGAQKNVGSAGVTVVIVRDDLLGFALRECPSVLEYKVQAGNSSLYNTPPCFSIYVMGLVLEWIKNNGGAAAMEKLSSIKSQTIHEIIDNSQGFYVCPVEPQNRSKMNIPFRIGNAKGDDALEKRFLDKALELNMLSLKGHRSVGGIRASLYNAVTIEDVQKLAAFMKKFLEMHQL

SEQ ID NO: 341 - protein, 370 aa, synthetic construct
MDAPRQVVNFGPGPAKLPHSVLLEIQKELLDYKGVGISVLEMSHRSSDFAKIINNTENLVRELLAVPDNYKVIFLQGGGCGQFSAVPLNLIGLKAGRCADYVVTGAWSAKAAEEAKKFGTINIVHPKLGSYTKIPDPSTWNLNPDASYVYYCANETVHGVEFDFIPDVKGAVLVCDMSSNFLSKPVDGSKFGVIFAGAQKNVGSAGVTVVIVRDDLLGFALRECPSVLEYKVQAGNSSLYNTPPCFSIYVMGLVLEWIKNNGGAAAMEKLSSIKSQTIYEIIDNSQGFYVCPVEPQNRSKMNIPFRIGNAKGDDALEKRFLDKALELNMLSLKGHRSVGGIRASLYNAVTIEDVQKLAAFMKKFLEMHQL

SEQ ID NO: 342 - protein, 370 aa, synthetic construct
MDAPRQVVNFGPGPAKLPHSVLLEIQKELLDYKGVGISVLEMSHRSSDFAKIINNTENLVWELLAVPDNYKVIFLQGGGCGQFSAVPLNLIGLKAGRCADYVVTGAWSAKAAEEAKKFGTINIVHPKLGSYTKIPDPSTWNLNPDASYVYYCANETVHGVEFDFIPDVKGAVLVCDMSSNFLSKPVDVSKFGVIFAGAQKNVGSAGVTVVIVRDDLLGFALRECPSVLEYKVQAGNSSLYNTPPCFSIYVMGLVLEWIKNNGGAAAMEKLSSIKSQTIYEIIDNSQGFYVCPVEPQNRSKMNIPFRIGNAKGDDALEKRFLDKALELNMLSLKGHRSVGGIRASLYNAVTIEDVQKLAAFMKKFLEMHQL

SEQ ID NO: 343 - protein, 370 aa, synthetic construct
MDAPRQVVNFGPGPAKLPHSVLLEIQKELLDYKGVGISVLEMSHRSSDFAKIINNTENLVRELLAVPDNYKVIFLQGGGCGQFSAVPLNLIGLKAGRCADYVVTGAWSAKAAEEAKKFGTINIVHPKLGSYTKIPDPSTWNLNPDASYVYYCANETVHGVEFDFIPDVKGAVLVCDMSSNFLSKPVDVSKFGVIFAGAQKNVGSAGVTVVIVRDDLLGFALRECPSVLEYKVQAGNSSLYNTPPCFSIYVMGLVLEWIKNNGGAAAMEKLSSIKSQTIYEIIDNSQGFYVCPVEPQNISKMNIPFRIGNAKGDDALEKRFLDKALELNMLSLKGHRSVGGIRASLYNAVTIEDVQKLAAFMKKFLEMHQL

SEQ ID NO: 344 - protein, 370 aa, synthetic construct
MDAPRQVVNFGPGPAKLPHSVLLEIQKELLDYKGVGISVLEMSHRSSDFAKIINNTENLVRELLAVPDNYKVIFLQGGGCGQFSAVPLNLIGLKAGRCADYVVTGAWSAKAAEEAKKFGTINIVHPKLGSYTKIPDPSTWNLNPDDSYVYYCANETVHGVEFDFIPDVKGAVLVCDMSSNFLSKPVDVSKFGVIFAGAQKNVGSAGVTVVIVRDDLLGFALRECPSVLEYKVQAGNSSLYNTPPCFSIYVMGLVLEWIKNNGGAAAMEKLSSIKSQTIYEIIDNSQGFYVCPVEPQNRSKMNIPFRIGNAKGDDALEKRFLDKALELNMLSLKGHRSVGGIRASLYNAVTIEDVQKLAAFMKKFLEMHQL

SEQ ID NO: 345 - protein, 370 aa, synthetic construct
MDAPRQVVNFGPGPAKLPHSVLLEIQKELLDYKGVGISVLEMSHRSSDFAKIINNTENLVRELLAVPDNYKVIFLQGGGCGQFSAVPLNLIGLKAGRCADYVVTGAWSAKAAEEAKKFGTINIVHPKLGSYTKIPDPSTWNLNPDASYVYYCANETVHGVEFDFIPDVKGAVLVCDMSSNFLSKPVDVSKFGVIFAGAQKNVGSAGVTVVIVRDDLLGFALRECPSVLEYKVQAGNSSLYNTPPCFSIYVMGLVLEWIKNNGGAAAMEKLSSIKSQTIYEIIHNSQGFYVCPVEPQNRSKMNIPFRIGNAKGDDALEKRFLDKALELNMLSLKGHRSVGGIRASLYNAVTIEDVQKLAAFMKKFLEMHQL

SEQ ID NO: 346 - protein, 370 aa, synthetic construct
MDAPRQVVNFGPGPAKLPHSVLLEIQKELLDYKGVGISVLEMSHRSSDFAKIINNTENLVREWLAVPDNYKVIFLQGGGCGQFSAVPLNLIGLKAGRCADYVVTGAWSAKAAEEAKKFGTINIVHPKLGSYTKIPDPSTWNLNPDASYVYYCANETVHGVEFDFIPDVKGAVLVCDMSSNFLSKPVDVSKFGVIFAGAQKNVGSAGVTVVIVRDDLLGFALRECPSVLEYKVQAGNSSLYNTPPCFSIYVMGLVLEWIKNNGGAAAMEKLSSIKSQTIYEIIDNSQGFYVCPVEPQNRSKMNIPFRIGNAKGDDALEKRFLDKALELNMLSLKGHRSVGGIRASLYNAVTIEDVQKLAAFMKKFLEMHQL

SEQ ID NO: 347 - protein, 370 aa, synthetic construct
MDAPRQVVNFGPGPAKLPHSVLLEIQKELLDYKGVGISVLEMSHRSSDFAKIINNTENLVRELLAVPDNYKVIFLQGGGCGQFSAVPLNLIGLKAGRCADYVVTGAWSAKAAEEAKKFGTINIVHPKLGSYTKIPDPSTWNLNPDASYVYYCANETVHGVEFDFIPDVKGAVLVCDMSSNFLSKPVDVSKFGVIFAGAQKNVGSAGVTVVIVRDDLLGFALRECPSVLEYKVQAGNSSLYNTPPCFSIYVMGLVLEWIKNNGGAAAMEKLSSIKSQTIYEIIDNSQGFYVCPVEPQNRSKMNSPFRIGNAKGDDALEKRFLDKALELNMLSLKGHRSVGGIRASLYNAVTIEDVQKLAAFMKKFLEMHQL

SEQ ID NO: 348 - protein, 370 aa, synthetic construct
MDAPRQVVNFGPGPAKLPHSVLLEIQKELLDYKGVGISVLERSHRSSDFAKIINNTENLVRELLAVPDNYKVIFLQGGGCGQFSAVPLNLIGLKAGRCADYVVTGAWSAKAAEEAKKFGTINIVHPKLGSYTKIPDPSTWNLNPDASYVYYCANETVHGVEFDFIPDVKGAVLVCDMSSNFLSKPVDVSKFGVIFAGAQKNVGSAGVTVVIVRDDLLGFALRECPSVLEYKVQAGNSSLYNTPPCFSIYVMGLVLEWIKNNGGAAAMEKLSSIKSQTIYEIIDNSQGFYVCPVEPQNRSKMNIPFRIGNAKGDDALEKRFLDKALELNMLSLKGHRSVGGIRASLYNAVTIEDVQKLAAFMKKFLEMHQL

SEQ ID NO: 349 - protein, 370 aa, synthetic construct
MDAPRQVVNFGPGPAKLPHSVLLEIQKELLDYKGVGISVLEMSHRSSDFAKIINNTENLVRELLAVPDNYKVIFLQGGGCGQFSAVPLNLIGLKAGRCADYVVTGAWSAKAAEEAKKFGTINIVHPKLGSYTKIPDPSTWNLNPDASYVYYCANETVHGVEFDFIPDVKGAVLVCDMSSNFLSKPVDVSKFGVIFAGAQKNVGSAGVTVVIVRDDLLGFALREYPSVLEYKVQAGNSSLYNTPPCFSIYVMGLVLEWIKNNGGAAAMEKLSSIKSQTIYEIIDNSQGFYVCPVEPQNRSKMNIPFRIGNAKGDDALEKRFLDKALELNMLSLKGHRSVGGIRASLYNAVTIEDVQKLAAFMKKFLEMHQL

SEQ ID NO: 350 - protein, 370 aa, synthetic construct
MDAPRQVVNFGPGPAKLPHSVLLEIQKELLDYKGVGISVLEMSHRSSDFAKIINNTENLVRELLAVPDNYKVIFLQGGGCGQFSAVPLNLIGLKAGRCADYVVTGAWSAKAAEEAKKFGTINIVHPKLGSYTKIPDPSTWNLNPDASYVYYCANETVHGVEFDFIPDVKGAVLVCDMSSNFLSKPVDVSKFGVIFAGAQKNVGSAGVTVVIVRDDLLGFALRECPSVLEYKVQAGNSSLYNTPPCFSIYVMGLVLEWIKNNGGAAAMEKLSSIKSQTIYEIIDNTQGFYVCPVEPQNRSKMNIPFRIGNAKGDDALEKRFLDKALELNMLSLKGHRSVGGIRASLYNAVTIEDVQKLAAFMKKFLEMHQL

SEQ ID NO: 351 - protein, 370 aa, synthetic construct
MDAPRQVVNFGPGPAKLPHSVLLEIQKELLDYKGVGISVLEMSHRSSDFAKIINNTENLVRELLAVPDNYKVIFLQGGGCGQFSAVPLNLIGLKAGRCADYVVTGAWSAKAAEEAKKFGTINIVHPKLGSYTKIPDPSTWNLNPDASYVYYCANETVHGVEFDFIPDVKGAVLVCDMSSNFLSKPVDVSKFGVIFAGAQKNVGSAGVTEVIVRDDLLGFALRECPSVLEYKVQAGNSSLYNTPPCFSIYVMGLVLEWIKNNGGAAAMEKLSSIKSQTIYEIIDNSQGFYVCPVEPQNRSKMNIPFRIGNAKGDDALEKRFLDKALELNMLSLKGHRSVGGIRASLYNAVTIEDVQKLAAFMKKFLEMHQL

SEQ ID NO: 352 - protein, 370 aa, synthetic construct
MDAPRQVVNFGPGPAKLPHSVLLEIQKELLDYKGVGISVLEMSHRSSDFAKIINNTENLVRELLAVPDNYKVIFLQGGGCGQFSAVPLNLIGLKAGRCADYVVTGAWSAKAAEEAKKFGTINIVHPKLGSYTKIPDPSTWNLNPDASYVYYCANETVHGVEFDFIPDVKGAVLVCDMSSNFLSKPVDVSKFGVIFAGAQKNVGSAGVTVVIVRDDLLGFALRECPSVLEYKVQAGNSSLYNTPPCFSIYVMGLVLEWIKNNGGAAAMEKLSSIKSQTIYEIIDNSQGFYVCPVEPQNRSKMNIPFRIGNAKGDDALEKRLLDKALELNMLSLKGHRSVGGIRASLYNAVTIEDVQKLAAFMKKFLEMHQL

SEQ ID NO: 353 - protein, 370 aa, synthetic construct
MDAPRQVVNFGPGPAKLPHSVLLEIQKELLDYKGVGISVLEMSHRSSDFAKIINNTENLVRELLAVPDNYKVIFLQGGGCGQFSAVPLNLIGLKAGRCADYVVTGAWSAKAAEEAKKFGTINIVHPKLGSYTKIPDPSTWNLNPDASYVYYCANETVHGVEFDFIPDVKGAVLVCDMSSNFLSKPVDVSKFGVIFAGAQKNVGSAGVTVVIVRDDLLGFALRECPSVLEYKVQAGNSSLYNTPPCFSIYVMGLVLEWIKNNGGAAAMEKLSSIKSQTIYEIIDNSQGFYVCPVEPQNRSKMNIPFRIGNAKGDDALEKRFLDKALELNMLSLKGHRSVGGIRASLYNAVTIEDVQKLAAFMKKILEMHQL

SEQ ID NO: 354 - protein, 370 aa, synthetic construct
MDAPRQVVNFGPGPAKLPHSVLLEIQKELLDYKGVGISVLEMSHRSSDFAKIINNTENLVRELLAVPDNYKVIFLQGGGCGQFSAVPLNLIGLKAGRCADYVVTGAWSAKAAEEAKKFGTINIVHPKLGSYTKIPDPSTWNLNPDASYVYYCANETVHGVEFDFIPDVKGAVLLCDMSSNFLSKPVDVSKFGVIFAGAQKNVGSAGVTVVIVRDDLLGFALRECPSVLEYKVQAGNSSLYNTPPCFSIYVMGLVLEWIKNNGGAAAMEKLSSIKSQTIYEIIDNSQGFYVCPVEPQNRSKMNIPFRIGNAKGDDALEKRFLDKALELNMLSLKGHRSVGGIRASLYNAVTIEDVQKLAAFMKKFLEMHQL

SEQ ID NO: 355 - protein, 370 aa, synthetic construct
MDAPRQVVNFGPGPAKLPHSVLLEIQKELLDYKGVGISVLEMSHRSSDFAKIINNTENLVRELLAVPDNYKVIFLQGGGCGQFSAVPLNLIGLKAGRCADYVVTGAWSAKAAEEAKKFGTINIVHPKLGSYTKIPDPSTWNLNPDASYVYYCANETVHGVEFDFIPDVKGAVLVCDMSSNFLSKPVDVSKFGVIFAGAQKNVGSAGVTVVIVRDDLLGFALRECPSVLEYKVQAGNSSLYNTPPCFSIYVMGLVLEWIKNNGGAAAMEKLSSIKSQTIYEIIDNSQGFYVCPVEPQNRSKMNIPFRIGNAKGDDALEKRFLDKALELNMLSLKGHRSVGGIRASLYNAVTIEDVQKQAAFMKKFLEMHQL

SEQ ID NO: 356 - protein, 370 aa, synthetic construct
MDAPRQVVNFGPGPAKLPHSVLLEIQKELLDYKGVGISVLEMSHRSSDFAKIINNTENLVRELLAVPDNYKVIFLQGGGCGQFSAVPLNLIGLKAGRCADYVVTGAWSAKAAEEAKKFGTINIVHPKLGSYTKIPDPSTWNLNPDASYVYYCANETVHGVEFDFIPDVKGAVLVCDMSSNFLSKPVDVSKFGVIFAGAQKNVGSAGVTVVIVRDDLLGFALRECPSVLEYKVQAGNSSLYNTPPCFSIYVMGLVLEWIKNNGGAAAMEKLSSIKSQTIYEIIDNSQGFYVCPVEPQNSSKMNIPFRIGNAKGDDALEKRFLDKALELNMLSLKGHRSVGGIRASLYNAVTIEDVQKLAAFMKKFLEMHQL

SEQ ID NO: 357 - protein, 370 aa, synthetic construct
MDAPRQVVNFGPGPAKLPHSVLLEIQKELLDYKGVGISVLEMSHRSSDFAKIINNTENLVRELLAVPDNYKVIFLQGGGCGQFSAVPLNLIGLKAGRCADYVVTGAWSAKAAEEAKKFGTINIVHPKLGSYTKIPDPSTWNLNPDASYVYYCANETVHGVEFDFIPDVKGAVLVCDMSSNFLSKPVDVSKFGVIFAGAQKNVGSAGVTVVIVRDDLLGFALRECPSVLEYKVQAGNSSLYNTPPCFSIYVMGLVLEWIKNNGGAAAMEKLSSIKSQTIYEIIDNSQGFYVCPVEPQNRSKMNIPFRSGNAKGDDALEKRFLDKALELNMLSLKGHRSVGGIRASLYNAVTIEDVQKLAAFMKKFLEMHQL

SEQ ID NO: 358 - protein, 370 aa, synthetic construct
MDAPRQVVNFGPGPAKLPHSVLLEIQKELLDYKGVGISVLEMSHRSSDFAKIINNTENLVRELLAVPDNYKVIFLQGGGCGQFSAVPLNLIGLKAGRCADYVETGAWSAKAAEEAKKFGTINIVHPKLGSYTKIPDPSTWNLNPDASYVYYCANETVHGVEFDFIPDVKGAVLVCDMSSNFLSKPVDVSKFGVIFAGAQKNVGSAGVTVVIVRDDLLGFALRECPSVLEYKVQAGNSSLYNTPPCFSIYVMGLVLEWIKNNGGAAAMEKLSSIKSQTIYEIIDNSQGFYVCPVEPQNRSKMNIPFRIGNAKGDDALEKRFLDKALELNMLSLKGHRSVGGIRASLYNAVTIEDVQKLAAFMKKFLEMHQL

SEQ ID NO: 359 - protein, 370 aa, synthetic construct
MDAPRQVVNFGPGPAKLPHSVLLEIQKELLDYKGVGISVLEMSHRSSDFAKIINNTENLVRELLAVPDNYKVIFLQGGGCGQFSAVPLNLIGLKAGRCADYVVTGAWSAKAAEEAKKFGTINIVHPKLGSYTKIPDPSTWNLNPDASYVYYCANETVHGVEFDFIPDVKGAVLVYDMSSNFLSKPVDVSKFGVIFAGAQKNVGSAGVTVVIVRDDLLGFALRECPSVLEYKVQAGNSSLYNTPPCFSIYVMGLVLEWIKNNGGAAAMEKLSSIKSQTIYEIIDNSQGFYVCPVEPQNRSKMNIPFRIGNAKGDDALEKRFLDKALELNMLSLKGHRSVGGIRASLYNAVTIEDVQKLAAFMKKFLEMHQL

SEQ ID NO: 360 - protein, 370 aa, synthetic construct
MDAPRQVVNFGPGPAKLPHSVLLEIQKELLDYKGVGISVLEMSHRSSDFAKIINNTENLVRELLAVPDNYKVIFLQGGGCGQFSAVPLNLIGLKAGRCADYVVTGAWSAKAAEEAKKFGTINIVHPKLGSYTKIPDPSTWNLNPDASYVYYCANETVHGVEFDFIPDVKGAVLVCDMSSNFLSKPVDVSKFGVIFAGAQKNVGSAGVTVVIVRDDLLGFALRECPSVLEYKVQAGNSSLYNTPPCFSIYVMGLVLEWIKNNGGAAAMEKLSSIKSQTIYEIIDNSQGFYVCPVEPQNRSKMNIPFRIGNAKGDDALDKRFLDKALELNMLSLKGHRSVGGIRASLYNAVTIEDVQKLAAFMKKFLEMHQL

SEQ ID NO: 361 - protein, 370 aa, synthetic construct
MDAPRQVVNFGPGPAKLPHSVLLEIQKELLDYKGVGISVLEMSHRSSDFAKIINNTENLVRELLAVPDNYKVIFLQGGGCGQFSAVPLNLIGLKAGRCADYVVTGAWSAKAAEEAKKFGTINIVHPKLGSYTKIPDPSTWNLNPDASYVYYCANETVHGVEFDFIPDVKGAVLVCDMSSNFLSKPVDVSKFGVIFAGAQKNVGSAGVTVVIVRDDLLGFALRECPSVLEYKVQAGNSSLYNTPPCFSIYVMGLVLEWIKNNGGAAAMEKLSSIKSQTIYEIIDNSQGFYVCPVEPQNTSKMNIPFRIGNAKGDDALEKRFLDKALELNMLSLKGHRSVGGIRASLYNAVTIEDVQKLAAFMKKFLEMHQL

SEQ ID NO: 362 - protein, 370 aa, synthetic construct
MDAPRQVVNFGPGPAKLPHSVLLEIQKELLDYKGVGISVLEMSHRSSDFAKIINNTENLVRELLAVPDNYKVIFLQGGGCGQFSAVPLNLIGLKAGRCADYVVTGTWSAKAAEEAKKFGTINIVHPKLGSYTKIPDPSTWNLNPDASYVYYCANETVHGVEFDFIPDVKGAVLVCDMSSNFLSKPVDVSKFGVIFAGAQKNVGSAGVTVVIVRDDLLGFALRECPSVLEYKVQAGNSSLYNTPPCFSIYVMGLVLEWIKNNGGAAAMEKLSSIKSQTIYEIIDNSQGFYVCPVEPQNRSKMNIPFRIGNAKGDDALEKRFLDKALELNMLSLKGHRSVGGIRASLYNAVTIEDVQKLAAFMKKFLEMHQL

SEQ ID NO: 363 - protein, 370 aa, synthetic construct
MDAPRQVVNFGPGPAKLPHSVLLEIQKELLDYKGVGISVLEMSHRSSDFAKIINNTENLVRELLAVPDNYKVIFLQGGGCGQFSAVPLNLIGLKAGRCADYVVTGAWSAKAAEEAKKFGTINIVHPKLGSYTKIPDPSTWNLNPDASYVYYCANETVHGVEFDFIPDVKGAVLVCDMSSNFLSKPVDVSKFGVIFAGAQKNVGSAGVTVVIVRDDLLGFALRECPSVLEYKVQAGNSSLYNTPPCFSIYVMGLVLEWIKNNGGAAAMEKLSSIKSQTIYEIIDNSQGFYVCPVEPQNRSKMNIPFRIGNAKGDDALEKRFLDKALELNMLSLKGHRSVGGNRASLYNAVTIEDVQKLAAFMKKFLEMHQL

SEQ ID NO: 364 - protein, 370 aa, synthetic construct
MDAPRQVVNFGPGPAKLPHSVLLEIQKELLDYKGVGISVLEMSHRSSDFAKIINNTENLVRELLAVPDNYKVIFLQGGGCGQFSAVPLNLIGLKAGRCADYVVTGAWSAKAAEEAKKFGTINIVHPKLGSYTKIPDPSTWNLNPDASYVYYCANETVHGVEFDFIPDVKGAVLVCDMSSNFLSKPVDVSKFGVIFAGAQKNVGSAGVTVVIVRDDQLGFALRECPSVLEYKVQAGNSSLYNTPPCFSIYVMGLVLEWIKNNGGAAAMEKLSSIKSQTIYEIIDNSQGFYVCPVEPQNRSKMNIPFRIGNAKGDDALEKRFLDKALELNMLSLKGHRSVGGIRASLYNAVTIEDVQKLAAFMKKFLEMHQL

SEQ ID NO: 365 - protein, 370 aa, synthetic construct
MDAPRQVVNFGPGPAKLPHSVLLEIQKELLDYKGVGISVLEMSHRSSDFAKIINNTENLVRELLAVPDNYKVIFLQGGGCGQFSAVPLNLIGLKAGRCADYVVTGAWSAKAAEEAKKFGTINIVHPKLGSYTKIPDPSTWNLNPDASYVYYCANETVHGVEFDFIPDVKGAVLVCDMSSYFLSKPVDVSKFGVIFAGAQKNVGSAGVTVVIVRDDLLGFALRECPSVLEYKVQAGNSSLYNTPPCFSIYVMGLVLEWIKNNGGAAAMEKLSSIKSQTIYEIIDNSQGFYVCPVEPQNRSKMNIPFRIGNAKGDDALEKRFLDKALELNMLSLKGHRSVGGIRASLYNAVTIEDVQKLAAFMKKFLEMHQL

SEQ ID NO: 366 - protein, 370 aa, synthetic construct
MDAPRQVVNFGPGPAKLPHSVLLEIQKELLDYKGVGISVLEMSHRSSDFAKIINNTENLVRELLAVPDNYKVIFLQGGGCGQFSAVPLNLIGLKAGRCADYVVTGAWSAKAAEEAKKFGTINIVHPKLGSYTKIPDPSTWNLNPDASYVYYCANETVHGVEFDFIPDVKGAVLVCDMSSNFLSKPVDVSKFGVIFAGAQKNVGSAGVTVVIVRDDLLGFALRECPSVLEYKVQAGNSSLYNTPPCFSIYVMGLVLEWIKNNGGAAAMEKLSSIKSQTIYEIIDNSQGFYVCPVEPQNRSKMNIPFRIGNAKGDDALGKRFLDKALELNMLSLKGHRSVGGIRASLYNAVTIEDVQKLAAFMKKFLEMHQL

SEQ ID NO: 367 - protein, 370 aa, synthetic construct
MDAPRQVVNFGPGPAKLPHSVLLEIQKELLDYKGVGISVLEMSHRSSDFAKIINNTENLVRELLAVPDNYKVIFLQGGGCGQFSAVPLNLIGLKAGRCADYVVTGAWSAKAAEEAKKFGTINIVHPKLGSYTKIPDPSPWNLNPDASYVYYCANETVHGVEFDFIPDVKGAVLVCDMSSNFLSKPVDVSKFGVIFAGAQKNVGSAGVTVVIVRDDLLGFALRECPSVLEYKVQAGNSSLYNTPPCFSIYVMGLVLEWIKNNGGAAAMEKLSSIKSQTIYEIIDNSQGFYVCPVEPQNRSKMNIPFRIGNAKGDDALEKRFLDKALELNMLSLKGHRSVGGIRASLYNAVTIEDVQKLAAFMKKFLEMHQL

SEQ ID NO: 368 - protein, 370 aa, synthetic construct
MDAPRQVVNFGPGPAKLPHSVLLEIQKELLDYKGVGISVLEMSHRSSDFAKIINNTENLVRELLAVPDNYKVIFLQGGGCGQFSAVPLNLIGLKAGRCADYVVTGAWSAKAAEEAKKFGTINIVHPKLGSYTKIPDPSTWNLNPDASYVYYCANETVHGVEFDFIPDVKGAGLVCDMSSNFLSKPVDVSKFGVIFAGAQKNVGSAGVTVVIVRDDLLGFALRECPSVLEYKVQAGNSSLYNTPPCFSIYVMGLVLEWIKNNGGAAAMEKLSSIKSQTIYEIIDNSQGFYVCPVEPQNRSKMNIPFRIGNAKGDDALEKRFLDKALELNMLSLKGHRSVGGIRASLYNAVTIEDVQKLAAFMKKFLEMHQL

SEQ ID NO: 369 - protein, 370 aa, synthetic construct
MDAPRQVVNFGPGPAKLPHSVLLEIQKELLDYKGVGISVLEMSHRSSDFAKIINNTENLVRELLAVPDNYKVIFLQGGGCGQFSAVPLNLIGLKAGRCADYVVTGAWSAKAAEEAKKFGTINIVHPKLGSYTKIPDPSTWNLNPDASYVYYCANETVHGVEFVFIPDVKGAVLVCDMSSNFLSKPVDVSKFGVIFAGAQKNVGSAGVTVVIVRDDLLGFALRECPSVLEYKVQAGNSSLYNTPPCFSIYVMGLVLEWIKNNGGAAAMEKLSSIKSQTIYEIIDNSQGFYVCPVEPQNRSKMNIPFRIGNAKGDDALEKRFLDKALELNMLSLKGHRSVGGIRASLYNAVTIEDVQKLAAFMKKFLEMHQL

SEQ ID NO: 370 - protein, 370 aa, synthetic construct
MDAPRQVVNFGPGPAKLPHSVLLEIQKELLDYKGVGISVLEMSHRSSDFAKIINNTENLVRELLAVPDNYKVIFLQGGGCGQFSAVPLNLIGLKAGRCADYVVTGAWSAKAEEEAKKFGTINIVHPKLGSYTKIPDPSTWNLNPDASYVYYCANETVHGVEFDFIPDVKGAVLVCDMSSNFLSKPVDVSKFGVIFAGAQKNVGSAGVTVVIVRDDLLGFALRECPSVLEYKVQAGNSSLYNTPPCFSIYVMGLVLEWIKNNGGAAAMEKLSSIKSQTIYEIIDNSQGFYVCPVEPQNRSKMNIPFRIGNAKGDDALEKRFLDKALELNMLSLKGHRSVGGIRASLYNAVTIEDVQKLAAFMKKFLEMHQL

SEQ ID NO: 371 - protein, 370 aa, synthetic construct
MDAPRQVVNFGPGPAKLPHSVLLEIQKELLDYKGVGISVLEMSHRSSDFAKIINNTENLVRELLAVPDNYKVIFLQGGGCGQFSAVPLNLIGLKAGRCADYVVTGAWSAKAAEEAKKFGTINIVHPKLGSYTKIPDPSTWNLNPDASYVYYCANETVHGVEFDFIPDVKGAVLVCDMSSNFLSKPVDVSKFGVIFAGAQKNVGSAGVTVVIVRDDLLGFALRECPSVLEYKVQAGNSSLYNTPPCFSIYVMGLVLEWIKNNGGAAAMEKLSSIKSQTIYEIIDNAQGFYVCPVEPQNRSKMNIPFRIGNAKGDDALEKRFLDKALELNMLSLKGHRSVGGIRASLYNAVTIEDVQKLAAFMKKFLEMHQL

SEQ ID NO: 372 - protein, 370 aa, synthetic construct
MDAPRQVVNFGPGPAKLPHSVLLEIQKELLDYKGVGISVLEMSHRSSDFAKIINNTENLVRELLAVPDNYKVIFLQGGGCGQFSAVPLNLIGLKAGRCADYVVTGAWSAKAAEEAKKFGTINIVHPKLGSYTKIPDPSTWNLNPDASYVYYCANETVHGVEFDFIPDVKGAVLVCDMSSNFLSKPVDVSKFGVIFAGAQKNVGSAGVTVVIVRDDLLGFALRECPSVLEYKVQAGNSSLYNTPPCFSIYVMGLVLEWIKNNGGAAAMEKLSSIKSQTIYEIIDNSQGFYVCPVEPQNRSKMNIPFRIGNAKGDDALEKRFLDKDLELNMLSLKGHRSVGGIRASLYNAVTIEDVQKLAAFMKKFLEMHQL

SEQ ID NO: 373 - protein, 370 aa, synthetic construct
MDAPRQVVNFGPGPAKLPHSVLLEIQKELLDYKGVGISVLEMSHRSSDFAKIINNTENLVRELLAVPDNYKVIFLQGGGCGQFSAVPLNLIGLKAGRCADYVVTGAWSAKAAEEAKKFGTINIVHPKLGSYTKIPDPSTWNLNPDASYVYYCANETVHGVEFDFIPDVKGAVLVCDMSSNFLSKPVDVSKFGVIFAGAQKNVGSAGVTVVIVRDDLLGFALRECPSVLEYKVQAGNSSLYNTPPCFSIYVMGLVLEWIKNNGGAAAMEKLSSIKSQTIYEIIDNSQGFYVCPVEPQNRSKMNIPFRIGNAKGDDALEKRFLDKALELNMLSLKGHRSVGGIRASLYNAVTIEDVQKLAAFMKKFLVMHQL

SEQ ID NO: 374 - protein, 370 aa, synthetic construct
MDAPRQVVNFGPGPAKLPHSVLLEIQKELLDYKGVGISVLEMSHRSSDFAKIINNTENLVRELLAVPDNYKVIFLQGGGCGQFSAVPLNLIGLKAGRCADYVVTGAWSAKAAEEAKKFGTINIVHPKLGSYTKIPDPSTWNLNPDASYVYYCANETVHGVEFDFIPDVKGAVLVCDMSSNFLSKPVDVSKFGVIFAGAQKNVGSAGVTVVIVRDDLLGFALRECPSVLEYKVQAGNSSLYNTPPCFSIYVMGLVLEWIKNNGGAAAMEKLSSIKSQTIYEIFDNSQGFYVCPVEPQNRSKMNIPFRIGNAKGDDALEKRFLDKALELNMLSLKGHRSVGGIRASLYNAVTIEDVQKLAAFMKKFLEMHQL

SEQ ID NO: 375 - protein, 370 aa, synthetic construct
MDAPRQVVNFGPGPAKLPHSVLLEIQKELLDYKGVGISVLEMSHRSSDFAKIINNTENLVRELLAVPDNYKVIFLQGGGCGQFSAVPLNLIGLKAGRCADYVVTGAWSAKAAEEAKKFGTINIVHPKLGSYTKIPDPSTWNLNPDASYVYYCANETVYGVEFDFIPDVKGAVLVCDMSSNFLSKPVDVSKFGVIFAGAQKNVGSAGVTVVIVRDDLLGFALRECPSVLEYKVQAGNSSLYNTPPCFSIYVMGLVLEWIKNNGGAAAMEKLSSIKSQTIYEIIDNSQGFYVCPVEPQNRSKMNIPFRIGNAKGDDALEKRFLDKALELNMLSLKGHRSVGGIRASLYNAVTIEDVQKLAAFMKKFLEMHQL

SEQ ID NO: 376 - protein, 370 aa, synthetic construct
MDAPRQVVNFGPGPAKLPHSVLLEIQKELLDYKGVGISVLEMSHRSSDFAKIINNTENLVRELLAVPDNYKVIFLQGGGCGQFSAVPLNLIGLKAGRCADYVVTGAWSAKAAEEAKKFGTINIVHPKLGSYTKIPDPSTWNLNPDASYVYYCANETVHGVEFDFIPDVKGAVLVCDMSSNCLSKPVDVSKFGVIFAGAQKNVGSAGVTVVIVRDDLLGFALRECPSVLEYKVQAGNSSLYNTPPCFSIYVMGLVLEWIKNNGGAAAMEKLSSIKSQTIYEIIDNSQGFYVCPVEPQNRSKMNIPFRIGNAKGDDALEKRFLDKALELNMLSLKGHRSVGGIRASLYNAVTIEDVQKLAAFMKKFLEMHQL

SEQ ID NO: 377 - protein, 370 aa, synthetic construct
MDAPRQVVNFGPGPAKLPHSVLLEIQKELLDYKGVGISVLEMSHRSSDFAKIINNTENLVRELLAVPDNYKVIFLQGGGCGQFSAVPLNLIGLKAGRCADYVVTGAWSAKAAEEAKKFGTINIVHPKLGSYTKIPDPSTWNLNPDASYVYYCANETVHGVEFDFIPDVKGAVLVCDMSSNFLSKPVDVSKFGVIFAGAQKNVGSAGVTVVIVRDDLLGFALRECPSVLEYKVQAGNSSLYNTPPCFSIYVMGLVLEWIKNNGGAAAMEKLSSIKSQTIDEIIDNSQGFYVCPVEPQNRSKMNIPFRIGNAKGDDALEKRFLDKALELNMLSLKGHRSVGGIRASLYNAVTIEDVQKLAAFMKKFLEMHQL

SEQ ID NO: 378 - protein, 370 aa, synthetic construct
MDAPRQVVNFGPGPAKLPHSVLLEIQKELLDYKGVGISVLEMSHRSSDFAKIINNTENLVRELLAVPDNYKVIFLQGGGCGQFSAVPLNLIGLKAGRCADYVVTGAWSAKAAEEAKKFGTINIVHPKLGSYTKIPDPSTWNLNPDASYVYYCANETVHGVEFDFIPDVKGAVLVCDMSSNFLSKPVDVSKFGVIFAGAQKNVGSAGVTVVIVRDDLLGFALRECPSVLEYKVQAGNSSLYNTPPCFSIYVMGLVLEWIKNNGGAAAMEKLSSIKSQTIYEIIDNSQGFYVCPVEPQNRSKMNIPFRIGNAKGDDALEKRFLDKALELNMLSLKGHRSVGGIRASLYNAVTIEDVQKLAPFMKKFLEMHQL

SEQ ID NO: 379 - protein, 370 aa, synthetic construct
MDAPRQVVNFGPGPAKLPHSVLLEIQKELLDYKGVGISVLEMSHRSSDFAKIINNTENLVRELLAVPDNYKVIFLQGGGCGQFSAVPLNLIGLKAGRCADYVVTGAWSAKAAEEAKKFGTINIVHPKLGSYTKIPDPSTWNLNPDASYVYYCANETVHGVEFDFIPDVKGAVLVCDMSSNFLSKPVDVSKVGVIFAGAQKNVGSAGVTVVIVRDDLLGFALRECPSVLEYKVQAGNSSLYNTPPCFSIYVMGLVLEWIKNNGGAAAMEKLSSIKSQTIYEIIDNSQGFYVCPVEPQNRSKMNIPFRIGNAKGDDALEKRFLDKALELNMLSLKGHRSVGGIRASLYNAVTIEDVQKLAAFMKKFLEMHQL

SEQ ID NO: 380 - protein, 370 aa, synthetic construct
MDAPRQVVNFGPGPAKLPHSVLLEIQKELLDYKGVGISVLEMSHRSSDFAKIINNTENLVRELLAVPDNYKVIFLQGGGCGQFSAVPLNLIGLKAGRCADYVVTGAWSAKAAEEAKKFGTINIVHPKLGSYTKIPDPSTWNLNPDASYVYYCANETVHGVEFDFIPDVKGAVLVCDMSSNFLSKPVDVSKFGVIFAGAQKNVGSAGVTVVIVRDDLLGFALRECPSVLEYKVQAGNSSLYNTPPCFSIYVMGLVLEWIKNNGGAAAMEKLSSIKSQTIYEIIDNSQGFYVCPVEPQNRSKMNIPFRIGNAKGDDALEKRFLDKALELNMLSLKGHRSVGGIRASLYYAVTIEDVQKLAAFMKKFLEMHQL

SEQ ID NO: 381 - protein, 370 aa, synthetic construct
MDAPRQVVNFGPGPAKLPHSVLLEIQKELLDYKGVGISVLEMSHRSSDFAKIINNTENLVRELLAVPDNYKVIFLQGGGCGQFSAVPLNLIGLKAGRCADYVVTGAWSAKAAEEAKKFGTINIVHPKLGSYTKIPDPSTWNLNPDASYVYYCANETVHGVEFDFIPDVKGAVLVCDMSSNFLSKPVDVSKFGVIFAGAQKNVGSAGVTVVIVRDDLLGFALRECPSVLEYKVQAGNSSLYNTPPCFSIYVMGLVLEWIKNNGGAAAMEKLSSIKSQTIYEFIDNSQGFYVCPVEPQNRSKMNIPFRIGNAKGDDALEKRFLDKALELNMLSLKGHRSVGGIRASLYNAVTIEDVQKLAAFMKKFLEMHQL

SEQ ID NO: 382 - protein, 370 aa, synthetic construct
MDAPRQVVNFGPGPAKLPHSVLLEIQKELLDYKGVGISVLEMSHRSSDFAKIINNTENLVRELLAVPDNYKVIFLQGGGCGQFSAVPLNLIGLKAGRCADYVVTGAWSAKAAEEAKKFGTINIVHPKLGSYTKIPDPSTWNLNPDASYVYYCANETVHGVEFDFIPDVKGAVLVCDMSSNFLSKPVDVSKFGVIFAGAQKNVGSAGVTVVIVRDDLLGFALRECPSVLEYKVQAGNSSLYNTPPCFSIYVMGLVLEWIKNNGGAAAMEKLSSIKTQTIYEIIDNSQGFYVCPVEPQNRSKMNIPFRIGNAKGDDALEKRFLDKALELNMLSLKGHRSVGGIRASLYNAVTIEDVQKLAAFMKKFLEMHQL

SEQ ID NO: 383 - protein, 370 aa, synthetic construct
MDAPRQVVNFGPGPAKLPHSVLLEIQKELLDYKGVGISVLEMSHRSSDFAKIINNTENLVRELLAVPDNYKVIFLQGGGCGQFSAVPLNLIGLKAGRCADYVVTGAWSAKAAEEAKKFGTINIVHPKLGSYTKIPDPSTWNLNPDASYVYYCANETVHGVEFDFIPDVKGAVLVCDMSSNFLSKPVDVSKFGVIFAGAQKNVGSAGVTVVIVRDDLLGFALRECPSVLEYKVQAGNSSLYNTPPCFSIYVMGLVLEWIKNNGGAAAMEKLSSIISQTIYEIIDNSQGFYVCPVEPQNRSKMNIPFRIGNAKGDDALEKRFLDKALELNMLSLKGHRSVGGIRASLYNAVTIEDVQKLAAFMKKFLEMHQL

SEQ ID NO: 384 - protein, 370 aa, synthetic construct
MDAPRQVVNFGTGPAKLPHSVLLEIQKELLDYKGVGISVLEMSHRSSDFAKIINNTENLVRELLAVPDNYKVIFLQGGGCGQFSAVPLNLIGLKAGRCADYVVTGAWSAKAAEEAKKFGTINIVHPKLGSYTKIPDPSTWNLNPDASYVYYCANETVHGVEFDFIPDVKGAVLVCDMSSNFLSKPVDVSKFGVIFAGAQKNVGSAGVTVVIVRDDLLGFALRECPSVLEYKVQAGNSSLYNTPPCFSIYVMGLVLEWIKNNGGAAAMEKLSSIKSQTIYEIIDNSQGFYVCPVEPQNRSKMNIPFRIGNAKGDDALEKRFLDKALELNMLSLKGHRSVGGIRASLYNAVTIEDVQKLAAFMKKFLEMHQL

SEQ ID NO: 385 - protein, 370 aa, synthetic construct
MDAPRQVVNFGPGPAKLPHSVLLEIQKELLDYKGVGISVLEMSHRSSDFAKIINNTENLVRELLAVPDNYKVIFLQGGGCGQFSAVPLNLIGLKAGRCADYVVTGAWSAKAAEEAKKFGTINIVHPKLGSYTKIPDPSTWNLNPDASYVYYCANETVHGVEFDFIPDVKGAVLVCDMSSNFLSKPVDVSKFGVIFAGAQKNVGSAGVTVVIVRDDLLGFALRECPSVLEYKVQAGNSSLYNTPPCFSIYVMGLVLEWIKNNGGAAAMEKLSSIKSQTIFEIIDNSQGFYVCPVEPQNRSKMNIPFRIGNAKGDDALEKRFLDKALELNMLSLKGHRSVGGIRASLYNAVTIEDVQKLAAFMKKFLEMHQL

SEQ ID NO: 386 - protein, 370 aa, synthetic construct
MDAPRQVVNFGPGPAKLPHSVLLEIQKELLDYKGVGISVLEMSHRSSDFAKIINNTENLVRELLAVPDNYKVIFLQGGGCGQFSAVPLNLIGLKAGRCADYVVTGAWSAKAAEEAKKFGTINIVHPKLGSYTKIPDPSTWNLNPDASYVYYCANETVHGVEFDFIPDVKGAVLVCDMSSNFLSKPVDVSKFGVIFAGAQKNVGSAGVTVVIVRDDLLGFALRECPSVLEYKVQAGNSSLYNTPPCFSIYVMGLVLEWIKNNGGAAAMEKLSSIKSQTIYEIIDNSQGFYVCPVEPQNRSKMNMPFRIGNAKGDDALEKRFLDKALELNMLSLKGHRSVGGIRASLYNAVTIEDVQKLAAFMKKFLEMHQL

SEQ ID NO: 387 - protein, 370 aa, synthetic construct
MDAPRQVVNFGPGPAKLPHSVLLEIQKELLDYKGVGISVLEMSHRSSDFAKIINNTENLVRELLAVPDNYKVIFLQGGGCGQFSAVPLNLIVLKAGRCADYVVTGAWSAKAAEEAKKFGTINIVHPKLGSYTKIPDPSTWNLNPDASYVYYCANETVHGVEFDFIPDVKGAVLVCDMSSNFLSKPVDVSKFGVIFAGAQKNVGSAGVTVVIVRDDLLGFALRECPSVLEYKVQAGNSSLYNTPPCFSIYVMGLVLEWIKNNGGAAAMEKLSSIKSQTIYEIIDNSQGFYVCPVEPQNRSKMNIPFRIGNAKGDDALEKRFLDKALELNMLSLKGHRSVGGIRASLYNAVTIEDVQKLAAFMKKFLEMHQL

SEQ ID NO: 388 - protein, 370 aa, synthetic construct
MDAPRQVVNFGPGPAKLPHSVLLEIQKELLDYKGVGISVLEMSHRSSDFAKIINNTENLVRELLAVPDNYKVIFLQGGGCGQFSAVPLNLIGLKAGRCADYVVTGAWSAKAAEEAKKFGTINIVHPKLGSYTKIPDPSTWNLNPDASYVYYCANETVHGVEFDFIPDVKGAVLVCDMSSNFLSKPVDVSKFGVIFAGAQKNVGSAGVTVVIVRDDLLGFALRECPSVLEYKVQAGNSSLYNTPPCFSIYVMGLVLEWIKNNGGAAAMEKLSSIKSQTIYEIIDNSQGFYVCLVEPQNRSKMNIPFRIGNAKGDDALEKRFLDKALELNMLSLKGHRSVGGIRASLYNAVTIEDVQKLAAFMKKFLEMHQL

SEQ ID NO: 389 - protein, 370 aa, synthetic construct
MDAPRQVVNFGPGPAKLPHSVLLEIQKELLDYKGVGISVLEMSHRSSDFAKIINNTENLVRELLAVPDNYKVIFLQGGGCGQFSAVPLNLIGLKAGRCADYVVTGAWSAKAAEEAKKFGTINIVHPKLGSYTKIPDPSTWNLNPDASYVYYCANETVHGVEFDFIADVKGAVLVCDMSSNFLSKPVDVSKFGVIFAGAQKNVGSAGVTVVIVRDDLLGFALRECPSVLEYKVQAGNSSLYNTPPCFSIYVMGLVLEWIKNNGGAAAMEKLSSIKSQTIYEIIDNSQGFYVCPVEPQNRSKMNIPFRIGNAKGDDALEKRFLDKALELNMLSLKGHRSVGGIRASLYNAVTIEDVQKLAAFMKKFLEMHQL

SEQ ID NO: 390 - protein, 370 aa, synthetic construct
MDAPRQVVNFGPGPAKLPHSVLLEIQKELLDYKGVGISVLEMSHRSSDFAKIINNTENLVRELLAVPDNYKVIFLQGGGCGQFSAVPLNLIGLKAGRCADYVVTGAWSAKAAEEAKKFGTINIVHPKLGSYTKIPDPSTWNLNPDASYVYYCANETVHGVEFDFIPDVKGAVLVCDMSSNFLSKPVDVSKFGVIFAGAQKNVGSAGVTVVIVSDDLLGFALRECPSVLEYKVQAGNSSLYNTPPCFSIYVMGLVLEWIKNNGGAAAMEKLSSIKSQTIYEIIDNSQGFYVCPVEPQNRSKMNIPFRIGNAKGDDALEKRFLDKALELNMLSLKGHRSVGGIRASLYNAVTIEDVQKLAAFMKKFLEMHQL

SEQ ID NO: 391 - protein, 370 aa, synthetic construct
MDAPRQVVNFGPGPAKLPHSVLLEIQKELLDYKGVGISVLEMSHRSSDFAKIINNTENLVRELLAVPDNYKVIFLQGGGCGQFSAVPLNLIGLKAGRCADYVVTGAWSAKAAEEAKKFGTINIVHPKLGSYTKIPDPSTWNLNPDASYVYYCANETVHGVEFDFIPDVKGAVLVCDMSSNFLSKPVDVSKFGVIFAGAQKNVGSAGVTVVIVRDDLLGFALRECPSVLEYKVQAGNSSLYNTPPCFSIYVMGLVLEWIKNNGGAAAMEKLSSIKSQTIYEIIDNSQGFYVCPAEPQNRSKMNIPFRIGNAKGDDALEKRFLDKALELNMLSLKGHRSVGGIRASLYNAVTIEDVQKLAAFMKKFLEMHQL

SEQ ID NO: 392 - protein, 370 aa, synthetic construct
MDAPRQVVNFGPGPAKLPHSVLLEIQKELLDYKGVGISVLEMSHRSSDFAKIINNTENLVRELLAVPDNYKVIFLQGGGCGQFSAVPLNLIGLKAGRCADYVVTGAWSAKAAEEAKKFGTINIVHPKLGSYTKIPDPSTWNLNPDASYVYYCANETVHGVEFDFIPDVKGAVLVCDKSSNFLSKPVDVSKFGVIFAGAQKNVGSAGVTVVIVRDDLLGFALRECPSVLEYKVQAGNSSLYNTPPCFSIYVMGLVLEWIKNNGGAAAMEKLSSIKSQTIYEIIDNSQGFYVCPVEPQNRSKMNIPFRIGNAKGDDALEKRFLDKALELNMLSLKGHRSVGGIRASLYNAVTIEDVQKLAAFMKKFLEMHQL

SEQ ID NO: 393 - protein, 370 aa, synthetic construct
MDAPRQVVNFGPGPAKLPHSVLLEIQKELLDYKGVGISVLEMSHRSSDFAKIINNTENLVRELLAVPDNYKVIFLQGGGCGQFSAVPLNLIGLKAGRCADYVVTGAWSAKAAEEAKKFGTINIVHPKLGSYTKIPDPSTWNLNPDASYVYYCANETVHGVEFDFIPDVKGAVLVCDMSSNFLSKPGDVSKFGVIFAGAQKNVGSAGVTVVIVRDDLLGFALRECPSVLEYKVQAGNSSLYNTPPCFSIYVMGLVLEWIKNNGGAAAMEKLSSIKSQTIYEIIDNSQGFYVCPVEPQNRSKMNIPFRIGNAKGDDALEKRFLDKALELNMLSLKGHRSVGGIRASLYNAVTIEDVQKLAAFMKKFLEMHQL

SEQ ID NO: 394 - protein, 370 aa, synthetic construct
MDAPRQVVNFGPGPAKLPHSVLLEIQKELLDYKGVGISVLEMSHRSSDFAKIINNTENLVRELLAVPDNYKVIFLQGGGCGQFSAVPLNLIGLKAGRCADYVVTGAWSAKAAEEAKKFGTINIVHPKLGSYTKIPDPSTWNLNPDASYVYYCANETVHGVEFDFIPDVKGAVLVCDMSSNFLSKPVDVSKFGVIFAGAQKNVGSAGVTVVIVRDDLLGFALRECPSVLEYKVQAGNSSLYNTPPCFSIYVMGLVLEWIKNNGGAAAMEKLSSIKSQTIYEIIDNSQGFYVCPVEPQNKSKMNIPFRIGNAKGDDALEKRFLDKALELNMLSLKGHRSVGGIRASLYNAVTIEDVQKLAAFMKKFLEMHQL

SEQ ID NO: 395 - protein, 370 aa, synthetic construct
MDAPRQVVNFGPGPAKLPHSVLLEIQKELLDYKGVGISVLEMSHRSSDFAKIINNTENLVRELLAVPDNYKVIFLQGGGCGQFSAVPLNLIGLKAGRCADYVVTGAWSAKAAEEAKKFGTINIVHPKLGSYTKIPDPSTWNLNPDASYVYYCANETVHGVEFYFIPDVKGAVLVCDMSSNFLSKPVDVSKFGVIFAGAQKNVGSAGVTVVIVRDDLLGFALRECPSVLEYKVQAGNSSLYNTPPCFSIYVMGLVLEWIKNNGGAAAMEKLSSIKSQTIYEIIDNSQGFYVCPVEPQNRSKMNIPFRIGNAKGDDALEKRFLDKALELNMLSLKGHRSVGGIRASLYNAVTIEDVQKLAAFMKKFLEMHQL

SEQ ID NO: 396 - protein, 370 aa, synthetic construct
MDAPRQVVNFGPGPAKLPHSVLLEIQKELLDYKGVGISVLEMSHRSSDFAKIINNTENLVRELLAVPDNYKVIFLQGGGCGQFSAVPLNLIGLKAGRCADYVVTGAWSAKAAEEAKKFGTINIVHPKLGSYTKIPDPSTWNLNPDASYVYYCANETVHGVEFDFIPDVKGAVLVCDMSSNFLSKPVDVSKFGVIFAGAQKNVGSAGVTVVIVRDDLLGFALRECPSVLEYKVQAGNSSLYNTPPCFSIYVMGLVLEWIKNNGGAAAMEKLSSIKSQTIYEIIDNSQGFYVCPVEPQNRSKMNIPFRIGNAKGDDALEKRFLDKALELIMLSLKGHRSVGGIRASLYNAVTIEDVQKLAAFMKKFLEMHQL

SEQ ID NO: 397 - protein, 370 aa, synthetic construct
MDAPRQVVNFGPGPAKLPHSVLLEIQKELLDYKGVGISVLEMSHRSSDFAKIINNTENLVRELLAVPDNYKVIFLQGGGCGQFSAVPLNLIGLKAGRCADYVVTGAWSAKAAEEAKKFGTINIVHPKLGSYTKLPDPSTWNLNPDASYVYYCANETVHGVEFDFIPDVKGAVLVCDMSSNFLSKPVDVSKFGVIFAGAQKNVGSAGVTVVIVRDDLLGFALRECPSVLEYKVQAGNSSLYNTPPCFSIYVMGLVLEWIKNNGGAAAMEKLSSIKSQTIYEIIDNSQGFYVCPVEPQNRSKMNIPFRIGNAKGDDALEKRFLDKALELNMLSLKGHRSVGGIRASLYNAVTIEDVQKLAAFMKKFLEMHQL

SEQ ID NO: 398 - protein, 370 aa, synthetic construct
MDAPRQVVNFGPGPAKLPHSVLLEIQKELLDYKGVGISVLEMSHRSSDFAKIINNTENLVRELLAVPDNYKVIFLQGGGCGQFSAVPLNLIGLKAGRCADYVVTGAWSAKAAEEAKKFGTINIVHPKLGSYTKIPDPSTWNLNPDASYVYYCANETVHGVEFDFIPDVKGAVLVCDMSSNFLSKPVDVSKFGVIFAGAQKNVGSAGVTVEIVRDDLLGFALRECPSVLEYKVQAGNSSLYNTPPCFSIYVMGLVLEWIKNNGGAAAMEKLSSIKSQTIYEIIDNSQGFYVCPVEPQNRSKMNIPFRIGNAKGDDALEKRFLDKALELNMLSLKGHRSVGGIRASLYNAVTIEDVQKLAAFMKKFLEMHQL

SEQ ID NO: 399 - protein, 370 aa, synthetic construct
MDAPRQVVNFGPGPAKLPHSVLLEIQKELLDYKGVGISVLEMSHRSSDFAKIINNTENLGRELLAVPDNYKVIFLQGGGCGQFSAVPLNLIGLKAGRCADYVVTGAWSAKAAEEAKKFGTINIVHPKLGSYTKIPDPSTWNLNPDASYVYYCANETVHGVEFDFIPDVKGAVLVCDMSSNFLSKPVDVSKFGVIFAGAQKNVGSAGVTVVIVRDDLLGFALRECPSVLEYKVQAGNSSLYNTPPCFSIYVMGLVLEWIKNNGGAAAMEKLSSIKSQTIYEIIDNSQGFYVCPVEPQNRSKMNIPFRIGNAKGDDALEKRFLDKALELNMLSLKGHRSVGGIRASLYNAVTIEDVQKLAAFMKKFLEMHQL

SEQ ID NO: 400 - protein, 370 aa, synthetic construct
MDAPRQVVNFGPGPAKLPHSVLLEIQKELLDYKGVGISVLEMSHRSSDFAKIINNTENLVRELLAVPDNYKVIFLQGGGCGQFSAVPLNLIGLKAGRCADYVVTGAWSAKAAEEAKKFGTINIVHPKLGSYTKIPDPSTWNLNPDASYVYYCANETVHGVEFDFIPDVKGAVLVCDMSSNFLSKPVDVSKFGVIFAGAQKNVGSAGVTVVIVRDDLLGFALRECPSVLEYKVQAGNSSLYNTPPCFSIYVMGLVLEWIKNNGGAAAMEKLSSIKSQTIYEIIDNSQGFYVCPVEPQNGSKMNIPFRIGNAKGDDALEKRFLDKALELNMLSLKGHRSVGGIRASLYNAVTIEDVQKLAAFMKKFLEMHQL

SEQ ID NO: 401 - protein, 370 aa, synthetic construct
MDAPRQVVNFGPGPAKLPHSVLLEIQKELLDYKGVGISVLEMSHRSSDFAKIINNTENLVRELLAVPDNYKVIFLQGGGCGQFSAVPLNLIGLKAGRCADYVVTGAWSAKAAEEAKKFGTINIVHPKLGSYTKIPDPSTWNLNPDASYVYYCANETVHGVEFDFIPDVKGAVLVCDMSSNFLSKPVDVSKFGVIFAGAQKNGGSAGVTVVIVRDDLLGFALRECPSVLEYKVQAGNSSLYNTPPCFSIYVMGLVLEWIKNNGGAAAMEKLSSIKSQTIYEIIDNSQGFYVCPVEPQNRSKMNIPFRIGNAKGDDALEKRFLDKALELNMLSLKGHRSVGGIRASLYNAVTIEDVQKLAAFMKKFLEMHQL

SEQ ID NO: 402 - protein, 370 aa, synthetic construct
MDAPRQVVNFGPGPAKLPHSVLLEIQKELLDYKGVGISVLEMSHRSSDFAKIINNTENLVRELLAVPDNYKVIFLQGGGCGQFSAVPLNLIGLKAGRCADYVVTGAWSAKAAEEAKKFGTINIVHPKLGSYTKIPDPSTWNLNPDASYVYYCANETVHGVEFDFIPDVKGAVLVCDMSSNFLSKPVDVSKFGVIFAGAQKNVGSAGVTVVIVRDDLLGFALRECPSVLEYKVQAGNSSLYNTPPCFSIYVMGLVLEWIKNNGGAAAMEKLSSIKSQTISEIIDNSQGFYVCPVEPQNRSKMNIPFRIGNAKGDDALEKRFLDKALELNMLSLKGHRSVGGIRASLYNAVTIEDVQKLAAFMKKFLEMHQL

SEQ ID NO: 403 - protein, 370 aa, synthetic construct
MDAPRQVVNFGPGPAKLPHSVLLEIQKELLDYKGVGISVLEMSHRSSDFAKIINNTENLVRELLAVPDNYKVIFLQGGGCGQFSAVPLNLIGLKAGRCADYVVTGAWSAKAAEEAKKFGTINIVHPKLGSYTKIPDPSTWNLNPDASYVYYCANETVHGVEFDFIPDVKGAVLVCDMSSNFLSKPVDVSKFGVIFAGAQKNVGSAGVTVVIVRDDLLGFALRECPSVLEYKVQAGNSSLYNTPPCFSIYVMGLVLEWIKNNGGAAAMEKLSSIKSQTIYEIIDNSQGFYVCPVEPQNRSKMNIPFRIGNAKGDDALEKRFLDKALELNMLSLKGHRSVGGIRASLYNAVTIEAVQKLAAFMKKFLEMHQL

SEQ ID NO: 404 - protein, 370 aa, synthetic construct
MDAPRQVVNFGPGPAKLPHSVLLEIQKELLDYKGVGISVLEMSHRSSDFAKIINNTENLVRELLAVPDNYKVIFLQGGGCGQFSAVPLNLIGLKAGRCADYVVTGAWSAKAAEEAKKFGTINIVHPKLGSYTKIPDPSTWNLNPDASYVYYCANETVHGVEFDFIPDVKGAVLVCDMSSNFLSKPVDVSKFGVIFAGAQKNVGSAEVTVVIVRDDLLGFALRECPSVLEYKVQAGNSSLYNTPPCFSIYVMGLVLEWIKNNGGAAAMEKLSSIKSQTIYEIIDNSQGFYVCPVEPQNRSKMNIPFRIGNAKGDDALEKRFLDKALELNMLSLKGHRSVGGIRASLYNAVTIEDVQKLAAFMKKFLEMHQL

SEQ ID NO: 405 - protein, 370 aa, synthetic construct
MDAPRQVVNFGPGPAKLPHSELLEIQKELLDYKGVGISVLEMSHRSSDFAKIINNTENLVRELLAVPDNYKVIFLQGGGCGQFSAVPLNLIGLKAGRCADYVVTGAWSAKAAEEAKKFGTINIVHPKLGSYTKIPDPSTWNLNPDASYVYYCANETVHGVEFDFIPDVKGAVLVCDMSSNFLSKPVDVSKFGVIFAGAQKNVGSAGVTVVIVRDDLLGFALRECPSVLEYKVQAGNSSLYNTPPCFSIYVMGLVLEWIKNNGGAAAMEKLSSIKSQTIYEIIDNSQGFYVCPVEPQNRSKMNIPFRIGNAKGDDALEKRFLDKALELNMLSLKGHRSVGGIRASLYNAVTIEDVQKLAAFMKKFLEMHQL

SEQ ID NO: 406 - protein, 370 aa, synthetic construct
MDAPRQVVNFGPGPAKLPHSVLLEIQKELLDYKGVGISVLEMSHRSSDFAKIINNTENLVRELLAVPDNYKVIFLQGGGCGQFSAVPLNLIGLKAGRCADYVVTGAWSAKAAEEAKKFGTINIVHPKLGSYTKTPDPSTWNLNPDASYVYYCANETVHGVEFDFIPDVKGAVLVCDMSSNFLSKPVDVSKFGVIFAGAQKNVGSAGVTVVIVRDDLLGFALRECPSVLEYKVQAGNSSLYNTPPCFSIYVMGLVLEWIKNNGGAAAMEKLSSIKSQTIYEIIDNSQGFYVCPVEPQNRSKMNIPFRIGNAKGDDALEKRFLDKALELNMLSLKGHRSVGGIRASLYNAVTIEDVQKLAAFMKKFLEMHQL

SEQ ID NO: 407 - protein, 370 aa, synthetic construct
MDAPRQVVNFGPGPAKLPHSVLLEIQKELLDYKGVGISVLEMSHRSSDFAKIINNTENLVRELLAVPDNYKVIFLQGGGCGQFSAVPLSLIGLKAGRCADYVVTGAWSAKAAEEAKKFGTINIVHPKLGSYTKIPDPSTWNLNPDASYVYYCANETVHGVEFDFIPDVKGAVLVCDMSSNFLSKPVDVSKFGVIFAGAQKNVGSAGVTVVIVRDDLLGFALRECPSVLEYKVQAGNSSLYNTPPCFSIYVMGLVLEWIKNNGGAAAMEKLSSIKSQTIYEIIDNSQGFYVCPVEPQNRSKMNIPFRIGNAKGDDALEKRFLDKALELNMLSLKGHRSVGGIRASLYNAVTIEDVQKLAAFMKKFLEMHQL

SEQ ID NO: 408 - protein, 370 aa, synthetic construct
MDAPRQVVNFGPGPAKLPHSVLLEIQKELLDYKGVGISVLEMSHRSSDFAKIINNTENLVRELLAVPDNYKVIFLQGGGCGQFSAVPLNLIGLKAGRCADYVVTGAWSAKAAEEAKKFGTINIVHPKLGSYTKIPDPSTWNLNPDASYVYYCANETVHGVEFDFIPDVKGAVLVCDMSSNFLSKPVDVSKFGVIFAGAQKNVGSAGVTVVIVRDDLLGFALRECPSVLEYKVQAGNSSLYNTPPCFSIYVMGLVLEWIKNNGGDAAMEKLSSIKSQTIYEIIDNSQGFYVCPVEPQNRSKMNIPFRIGNAKGDDALEKRFLDKALELNMLSLKGHRSVGGIRASLYNAVTIEDVQKLAAFMKKFLEMHQL

SEQ ID NO: 409 - protein, 370 aa, synthetic construct
MDAPRQVVNFGPGPAKLPHSVLLEIQKELLDYKGVGISVLEMSHRSSDFAKIINNTENLVRELLAVPDNYKVIFLQGGGRGQFSAVPLNLIGLKAGRCADYVVTGAWSAKAAEEAKKFGTINIVHPKLGSYTKIPDPSTWNLNPDASYVYYCANETVHGVEFDFIPDVKGAVLVCDMSSNFLSKPVDVSKFGVIFAGAQKNVGSAGVTVVIVRDDLLGFALRECPSVLEYKVQAGNSSLYNTPPCFSIYVMGLVLEWIKNNGGAAAMEKLSSIKSQTIYEIIDNSQGFYVCPVEPQNRSKMNIPFRIGNAKGDDALEKRFLDKALELNMLSLKGHRSVGGIRASLYNAVTIEDVQKLAAFMKKFLEMHQL

SEQ ID NO: 410 - protein, 370 aa, synthetic construct
MDAPRQVVNFGPGPAKLPHSVLLEIQKELLDYKGVGISVLEMSHRSSDFAKIINNTENLVRELLAVPDNYKVIFLQGGGCGQFSAVPLNLIGLKAGRCADYVVTGAWSAKAAEEAKKFGTINIVHPKLGSYTKIPDPSTWNLNPDASYVYYCANETVHGVEFDFIPDVKGAVLVCDMSSNFLSKPVDVSKFGVIFAGAQKNVGSAGVTVVIVRDDLLGFALRECPSVLEYKVQAGNSSLYNTPPCFSIYVMGLVLEWIKNNGGAAAMEKLSSIKSQPIYEIIDNSQGFYVCPVEPQNRSKMNIPFRIGNAKGDDALEKRFLDKALELNMLSLKGHRSVGGIRASLYNAVTIEDVQKLAAFMKKFLEMHQL

SEQ ID NO: 411 - protein, 370 aa, synthetic construct
MDAPRQVVNFGPGPAKLPHSVLLEIQKELLDYKGVGISVLEMSHRSSDFAKIINNTENLVRELLAVPDNYKVIFLQGGGCGQFSAVPLNLIGLKAGRCAYYVVTGAWSAKAAEEAKKFGTINIVHPKLGSYTKIPDPSTWNLNPDASYVYYCANETVHGVEFDFIPDVKGAVLVCDMSSNFLSKPVDVSKFGVIFAGAQKNVGSAGVTVVIVRDDLLGFALRECPSVLEYKVQAGNSSLYNTPPCFSIYVMGLVLEWIKNNGGAAAMEKLSSIKSQTIYEIIDNSQGFYVCPVEPQNRSKMNIPFRIGNAKGDDALEKRFLDKALELNMLSLKGHRSVGGIRASLYNAVTIEDVQKLAAFMKKFLEMHQL

SEQ ID NO: 412 - protein, 370 aa, synthetic construct
MDAPRQVVNFGPGPAKLPHSVLLEIQKELLDYKGVGISVLEMSHRSSDSAKIINNTENLVRELLAVPDNYKVIFLQGGGCGQFSAVPLNLIGLKAGRCADYVVTGAWSAKAAEEAKKFGTINIVHPKLGSYTKIPDPSTWNLNPDASYVYYCANETVHGVEFDFIPDVKGAVLVCDMSSNFLSKPVDVSKFGVIFAGAQKNVGSAGVTVVIVRDDLLGFALRECPSVLEYKVQAGNSSLYNTPPCFSIYVMGLVLEWIKNNGGAAAMEKLSSIKSQTIYEIIDNSQGFYVCPVEPQNRSKMNIPFRIGNAKGDDALEKRFLDKALELNMLSLKGHRSVGGIRASLYNAVTIEDVQKLAAFMKKFLEMHQL

SEQ ID NO: 413 - protein, 370 aa, synthetic construct
MDAPRQVVNFGPGPAKLPHSVLLEIQKELLDYKGVGISVLEMSHRSSDFAKIINNTENLVRELLAVPDNYKVIFLQGGGCGQFSAVPLNLIGLKAGRCADYVVTGAWSAKAAEEAKKFGTINIVHPKLGSYTKIPDPSTWNLNPDASYVYYCANETVHGVEFDFIPDVKGAVLVCDMSSNFLSKPVDVSKFGVIFAGAQKNVGSAGVTVVIVRDDLLGFALRECPSVLEYKVRAGNSSLYNTPPCFSIYVMGLVLEWIKNNGGAAAMEKLSSIKSQTIYEIIDNSQGFYVCPVEPQNRSKMNIPFRIGNAKGDDALEKRFLDKALELNMLSLKGHRSVGGIRASLYNAVTIEDVQKLAAFMKKFLEMHQL

SEQ ID NO: 414 - protein, 370 aa, synthetic construct
MDAPRQVVNFGPGPAKLPHSVLLEIQKELLDYKGVGISVLEMSHRSSDFAKIINNTENLVRELLAVPDNYKVIFLQGGGCGQFSAVPLNLIGLKAGRCADYVVTGAWSAKAAEEAKKFGTINIVHPKLGSYTKIPDPSTWNLNPDASYVYYCANETVHGVEFDFIPDVKGAVLVCDMSSNFLSKPVDVSKFGVIFAGAQKNVGSAGVTVVIVRDDLLGFALRECPSVLEYKVQAGNSSLYNTPPCFSIYVMGLVLEWIKNNGGAAAMEKLSSIKSQTIYEIIDNSQGFYVCPVEPQNRSKMNIPFRIGNAKGDDALEKRYLDKALELNMLSLKGHRSVGGIRASLYNAVTIEDVQKLAAFMKKFLEMHQL

SEQ ID NO: 415 - protein, 370 aa, synthetic construct
MDAPRQVVNFGPGPAKLPHSVLLEIQKELLDYKGVGISVLEMSHRSSDFAKIINNTENLVRELLAVPDNYKVIFLQGGGCGQFSAVPLNLIGLKAGRCADYVVTGAWSAKAAEEAKKFGTINIVHPKLGSYTKIPDPSTWNLNPDASYVYYCANETVHGVEVDFIPDVKGAVLVCDMSSNFLSKPVDVSKFGVIFAGAQKNVGSAGVTVVIVRDDLLGFALRECPSVLEYKVQAGNSSLYNTPPCFSIYVMGLVLEWIKNNGGAAAMEKLSSIKSQTIYEIIDNSQGFYVCPVEPQNRSKMNIPFRIGNAKGDDALEKRFLDKALELNMLSLKGHRSVGGIRASLYNAVTIEDVQKLAAFMKKFLEMHQL

SEQ ID NO: 416 - protein, 370 aa, synthetic construct
MDAPRQVVNFGPGPAKLPHSVLLEIQKELLDYKGVGISVLEMSHRSSDFAKIINNTENLVRELLAVPDNYKVIFLQGGGCGQFSAVPLNLIGLKAGRCADYVVTGAWSAKAAEEAKKFGTINIVHPKLGSYTKIPDPSTWNLNPDASYVYYCANETVHGVEFDFIPDVKGAVLVCDMSSNFLSKPVDVSKFGVIFASAQKNVGSAGVTVVIVRDDLLGFALRECPSVLEYKVQAGNSSLYNTPPCFSIYVMGLVLEWIKNNGGAAAMEKLSSIKSQTIYEIIDNSQGFYVCPVEPQNRSKMNIPFRIGNAKGDDALEKRFLDKALELNMLSLKGHRSVGGIRASLYNAVTIEDVQKLAAFMKKFLEMHQL

SEQ ID NO: 417 - protein, 370 aa, synthetic construct
MDAPRQVVNFGPGPAKLPHSVLLEIQKELLDYKGVGISVLEMSHRSSDFAKIINNTENLVRELLAVPDNYKVIFLQGGGCGQFSAVPLNLIGLKAGRCADYVVTGAWSAKAAEEAKKFGTINIVHPKLGSYTKIPDPSTWNLNPDASYVYYCANETVHGVEFDFIPDVKGAVLVCDMSSNFLSKPVDVSKFGVIFAGAQKNVGSAGVTVVIVRDDLLGFALRECPSVLEYKVQAGNSSLYNTPPCFSIYVMGLVLEWIKNNVGAAAMEKLSSIKSQTIYEIIDNSQGFYVCPVEPQNRSKMNIPFRIGNAKGDDALEKRFLDKALELNMLSLKGHRSVGGIRASLYNAVTIEDVQKLAAFMKKFLEMHQL

SEQ ID NO: 418 - protein, 370 aa, synthetic construct
MDAPRQVVNFGPGPAKLPHSVLLEIQKELLDYKGVGISVLEMSHRSSDFAKIINNTENLVRELLAVPDNYKVIFLQGGGCGQFSAVPLNLIGLKAGRCADYVVTGAWSAKAAEEAKKFGTINIVHPKLGSYTKIPDPSTWNLNPDASYVYYCANETVHGVEFDFIPDVKGAVLVCDMSSNFLSKPVDVSKFGVIFAGAQKNVGSAGVTVVIVRDDLLGFALRECPSVLESKVQAGNSSLYNTPPCFSIYVMGLVLEWIKNNGGAAAMEKLSSIKSQTIYEIIDNSQGFYVCPVEPQNRSKMNIPFRIGNAKGDDALEKRFLDKALELNMLSLKGHRSVGGIRASLYNAVTIEDVQKLAAFMKKFLEMHQL

SEQ ID NO: 419 - protein, 370 aa, synthetic construct
MDAPRQVVNFGPGPAKLPHSVLLEIQKELLDYKGVGISVLEMSHRSSDFAKIINNTENLVRELLAVPDNYKVIFLQGGGCGQFSAVPLNLIGLKAGRCADYVVTGAWSAKAAEEAKKFGTINIVHPKLGSYTKNPDPSTWNLNPDASYVYYCANETVHGVEFDFIPDVKGAVLVCDMSSNFLSKPVDVSKFGVIFAGAQKNVGSAGVTVVIVRDDLLGFALRECPSVLEYKVQAGNSSLYNTPPCFSIYVMGLVLEWIKNNGGAAAMEKLSSIKSQTIYEIIDNSQGFYVCPVEPQNRSKMNIPFRIGNAKGDDALEKRFLDKALELNMLSLKGHRSVGGIRASLYNAVTIEDVQKLAAFMKKFLEMHQL

SEQ ID NO: 420 - protein, 370 aa, synthetic construct
MDAPRQVVNFGPGPDKLPHSVLLEIQKELLDYKGVGISVLEMSHRSSDFAKIINNTENLVRELLAVPDNYKVIFLQGGGCGQFSAVPLNLIGLKAGRCADYVVTGAWSAKAAEEAKKFGTINIVHPKLGSYTKIPDPSTWNLNPDASYVYYCANETVHGVEFDFIPDVKGAVLVCDMSSNFLSKPVDVSKFGVIFAGAQKNVGSAGVTVVIVRDDLLGFALRECPSVLEYKVQAGNSSLYNTPPCFSIYVMGLVLEWIKNNGGAAAMEKLSSIKSQTIYEIIDNSQGFYVCPVEPQNRSKMNIPFRIGNAKGDDALEKRFLDKALELNMLSLKGHRSVGGIRASLYNAVTIEDVQKLAAFMKKFLEMHQL

SEQ ID NO: 421 - protein, 370 aa, synthetic construct
MDAPRQVVNFGPGPAKLPHSVLLEIQKELLDYKGVGISVLEMSHRSSDFAKIINNTENLVRELLAVPDNYKVIFLQGGGCGQFSAVPLNLIGLIAGRCADYVVTGAWSAKAAEEAKKFGTINIVHPKLGSYTKIPDPSTWNLNPDASYVYYCANETVHGVEFDFIPDVKGAVLVCDMSSNFLSKPVDVSKFGVIFAGAQKNVGSAGVTVVIVRDDLLGFALRECPSVLEYKVQAGNSSLYNTPPCFSIYVMGLVLEWIKNNGGAAAMEKLSSIKSQTIYEIIDNSQGFYVCPVEPQNRSKMNIPFRIGNAKGDDALEKRFLDKALELNMLSLKGHRSVGGIRASLYNAVTIEDVQKLAAFMKKFLEMHQL

SEQ ID NO: 422 - protein, 370 aa, synthetic construct
MDAPRQVVNFGPGPAKLPHSVLLEIQKELLDYKGVGISVLEMSHRSSDFAKIINNTENLVRELLAVPDNYKVIFLQGGGCGQFSAVPLNLIGLKAGRCADYVVTGAWSAKAAEEAKKFGTINIVHPKLGSYTKIPDPSTWNLNPDASYVYYCANETVHGVEFDFIPDVKGAVLVCDMSSNFLSKPVDVSKFGVIFAGAQKNVGSAGVTVVIVRDDLLGFALRECPSVLEYKVQAGNSSLYNTPPCFSIYVMGLVLEWIKNNGGAAAMEKLSSIKSQTIYEIIDNSQGFYVCPVEPQNRSKMNIPFRIGNAKGDDALEKRFLDKALELNMLSLKGHRSVGGIRASLYNAVTIEDVQKLAAFMKKFLEMRQL

SEQ ID NO: 423 - protein, 370 aa, synthetic construct
MDAPRQVVNFGPGPAKLPHSVLLEIQKELLDYKGVGISVLEMSHRSSDFAKIINNTENLVRELLAVPDNHKVIFLQGGGCGQFSAVPLNLIGLKAGRCADYVVTGAWSAKAAEEAKKFGTINIVHPKLGSYTKIPDPSTWNLNPDASYVYYCANETVHGVEFDFIPDVKGAVLVCDMSSNFLSKPVDVSKFGVIFAGAQKNVGSAGVTVVIVRDDLLGFALRECPSVLEYKVQAGNSSLYNTPPCFSIYVMGLVLEWIKNNGGAAAMEKLSSIKSQTIYEIIDNSQGFYVCPVEPQNRSKMNIPFRIGNAKGDDALEKRFLDKALELNMLSLKGHRSVGGIRASLYNAVTIEDVQKLAAFMKKFLEMHQL

SEQ ID NO: 424 - protein, 370 aa, synthetic construct
MDAPRQVVNFGPGPAKLPHSVLLEIQKELLDYKGVGISVLEMSHRSSDFAKIINNTENLVRELLAVPDNYKVIFLQGGGCGQFSAVPLNLIGLKAGRCADYVVTGAWSAKAAEEAKKFGTINIVHPKLGSYTKSPDPSTWNLNPDASYVYYCANETVHGVEFDFIPDVKGAVLVCDMSSNFLSKPVDVSKFGVIFAGAQKNVGSAGVTVVIVRDDLLGFALRECPSVLEYKVQAGNSSLYNTPPCFSIYVMGLVLEWIKNNGGAAAMEKLSSIKSQTIYEIIDNSQGFYVCPVEPQNRSKMNIPFRIGNAKGDDALEKRFLDKALELNMLSLKGHRSVGGIRASLYNAVTIEDVQKLAAFMKKFLEMHQL

SEQ ID NO: 425 - protein, 370 aa, synthetic construct
MDAPRQVVNFGPGPAKLPHSVLLEIQKELLDYKGVGISVLEMSHRSSDFAKIINNTENLVRELLAVPDNYKVIFLQGGGCGQFSAVPLNLIGLKAGRCADYVVTGAWSAKAAEEAKKFGTINIVHPKLGSYTKIPDPSTWNLNPDASYVYYCANETVHGVEFDFIPDVKGAVLVCDMSSNFLSKPVDVSKFGVIFAGAQKNVGSAGVTVVIVRDDLLGFALRECPSVLEYKVQAGNSSLYNTPPCFSIYVMGLVLEWIKNNGGAAAMEKLSSIKSQTIYEIIDNSQGFYVCPVEPQNRSKMNIPFRTGNAKGDDALEKRFLDKALELNMLSLKGHRSVGGIRASLYNAVTIEDVQKLAAFMKKFLEMHQL

SEQ ID NO: 426 - protein, 370 aa, synthetic construct
MDAPRQVVNFGPGPAKLPHSVLLEIQKELLDYKGVGISVLEMSHRSSDFAKIINNTENLVRELLAVPDNYKVIFLQGGGCGQFSAVPLNLIGLKAGRCADYVVTGAWSAKAAEEAKKFGTINIVHPKLGSYTKIPDPSTWNLNPDASYVYYCANETVHGVEFDFIPDVKGAVLVCDMSSNFLSKPVDVSKFGVIFAGAQKNVGSAGVTVVIVRDDLLGFALRECPSVLEYKVQAGNSSLYNTPPCFSIYVMGLVLEWIKNNGGAAAMEKLSSIKSQTIYEIIDNSQGFYVCPVEPQNRSKMNIPFRIGNAKGDDALEKRFLDKALELNMLSLKGHRSVGGIRASLYNAVTIEYVQKLAAFMKKFLEMHQL

SEQ ID NO: 427 - protein, 370 aa, synthetic construct
MDAPRQVVNFGPGPAKLPHSVLLEIQKELLDYKGVGISVLEMSHRSSDFAKIINNTENLVRELLAVPDNYKVIFLQGGGCGQFSAVPLNLIGLKAGRCADYVVTGAWSAKAAEEAKKFGTINIVHPKLGSYTKIPDPSTWNLNPDASYVYYCANETVHGVEFDFIPDVKGAVLVCDMSSNFLSKPVDVSKFGVIFAGAQKNVGSAGVTVVIVRDDLLGFALRECPSVLEYKVQAGNSSLYNTPPCFSIYVMGLVLEWIKNNGGAAAMEKLSSIKSQTIYEIIDNSQGFYVCPVEPQNRSKMNIPFRIGNAKGDDALEKRFLDKALELNMLSLKGHRSVGGIRASLYNAVTIEDVQKLDAFMKKFLEMHQL

SEQ ID NO: 428 - protein, 370 aa, synthetic construct
MDAPRQVVNFGPGPAKLPHSVLLEIQKELLDYKGVGISVLEMSHRSSDFAKIINNTENLVRELLAVPDNYKVIFLQGGGCGQFSAVPLNLIGLKAGRCADYVVTGAWSAKAAEKAKKFGTINIVHPKLGSYTKIPDPSTWNLNPDASYVYYCANETVHGVEFDFIPDVKGAVLVCDMSSNFLSKPVDVSKFGVIFAGAQKNVGSAGVTVVIVRDDLLGFALRECPSVLEYKVQAGNSSLYNTPPCFSIYVMGLVLEWIKNNGGAAAMEKLSSIKSQTIYEIIDNSQGFYVCPVEPQNRSKMNIPFRIGNAKGDDALEKRFLDKALELNMLSLKGHRSVGGIRASLYNAVTIEDVQKLAAFMKKFLEMHQL

SEQ ID NO: 429 - protein, 370 aa, synthetic construct
MDAPRQVVNFGPGPAKLPHSVLLEIQKELLDYKGVGISVLEMSHRSSDFAKIINNTENLVRELLAVPDNYKVIFLQGGGCGQFSAVPLNLIGLKAGRCADYVVTGAWSAKAAEEAKKFGTINIVHPKLGSYTKIPDPSTWNLNPDASYVYYCANETVHGVEFDFIPDVKGAVLVCDMSSNFLSKPVDVSKFGVIFAGAQKNVGSAGVTVVIVRDDLLGFALRECPSVLEYKVQAGNSSLYNTPPCFSIYVMGLVLEWIKNNGGAAAMEKLSSIKSQTIYEIIDNSQGFYGCPVEPQNRSKMNIPFRIGNAKGDDALEKRFLDKALELNMLSLKGHRSVGGIRASLYNAVTIEDVQKLAAFMKKFLEMHQL

SEQ ID NO: 430 - protein, 370 aa, synthetic construct
MDAPRQVVNFGPGPAKLPHSVLLEIQKELLDYKGVGISVLEMSHRSSDFAKIINNTENLVRELLAVPDNYKVIFLQGGGCGQFSAVPLNLIGLKAGRCADYVVTGAWSAKAAEEAKKFGTINIVHPKLGSYTKIPDPSTWNLNPDASYVYYCANETVHGMEFDFIPDVKGAVLVCDMSSNFLSKPVDVSKFGVIFAGAQKNVGSAGVTVVIVRDDLLGFALRECPSVLEYKVQAGNSSLYNTPPCFSIYVMGLVLEWIKNNGGAAAMEKLSSIKSQTIYEIIDNSQGFYVCPVEPQNRSKMNIPFRIGNAKGDDALEKRFLDKALELNMLSLKGHRSVGGIRASLYNAVTIEDVQKLAAFMKKFLEMHQL

SEQ ID NO: 431 - protein, 370 aa, synthetic construct
MDAPRQVVNFGPGPAKLPHSVLLEIQKELLDYKGVGISVLEMSHRSSDFAKIINNTENLVRELLAVPDNYKVIFLQGGGCGQFSAVPLNLIGLKAGRCADYVVTGAWSAKAAEEAKKFGTINIVHPKLGSYTKIPDPSTWNLNPDASYVYYCANETVHGGEFDFIPDVKGAVLVCDMSSNFLSKPVDVSKFGVIFAGAQKNVGSAGVTVVIVRDDLLGFALRECPSVLEYKVQAGNSSLYNTPPCFSIYVMGLVLEWIKNNGGAAAMEKLSSIKSQTIYEIIDNSQGFYVCPVEPQNRSKMNIPFRIGNAKGDDALEKRFLDKALELNMLSLKGHRSVGGIRASLYNAVTIEDVQKLAAFMKKFLEMHQL

SEQ ID NO: 432 - protein, 370 aa, synthetic construct
MDAPRQVVNFGPGPAKLPHSVLLEIQKELLDYKGVGISVLEMSHRSSDFAKIINNTENLVRELLAVPDNYKVIFLQGGGCGQFSAVPLNLIGLKAGRCADYVVTGAWSAKAAEEAKKSGTINIVHPKLGSYTKIPDPSTWNLNPDASYVYYCANETVHGVEFDFIPDVKGAVLVCDMSSNFLSKPVDVSKFGVIFAGAQKNVGSAGVTVVIVRDDLLGFALRECPSVLEYKVQAGNSSLYNTPPCFSIYVMGLVLEWIKNNGGAAAMEKLSSIKSQTIYEIIDNSQGFYVCPVEPQNRSKMNIPFRIGNAKGDDALEKRFLDKALELNMLSLKGHRSVGGIRASLYNAVTIEDVQKLAAFMKKFLEMHQL

SEQ ID NO: 433 - protein, 370 aa, synthetic construct
MDAPRQVVNFGPGPAKLPHSVLLEIQKELLDYKGVGISVLEMSHRSSDFAKIINNTENLVRELLAVPDNYKVIFLQGGGCGQFSAVPLNLIGLKAGRCADYVVTGAWSAKAAEEAKKFGTINIVHPKLGSYTKIPDPSTWNLNPDASYVYYCANETVHGVEFDFIPDVKGAVLVCDMSSNFLSKPVDVSKFGVIFAGAQKNVGSAGVTVVIVRDDLLGFALRECPSVLEYKVQAGNSSLYNTPPCFSIYVMGLVLEWIKNNGGAAAMEKLSSIKSQTIYEIIDNSPGFYVCPVEPQNRSKMNIPFRIGNAKGDDALEKRFLDKALELNMLSLKGHRSVGGIRASLYNAVTIEDVQKLAAFMKKFLEMHQL

SEQ ID NO: 434 - protein, 370 aa, synthetic construct
MDAPRQVVNFGPGPAKLPHSVLLEIQKELLDYKGVGISVLEMSHRSSDFAKIINNTENLVRELLAVPDNYKVIFLQGGGCGQFSAVPLNLIGLKAGRCADYVVTGAWSAKAAEEAKKFGTINIVHPKLGSYTKIPDPSTWNLNPDASYVYYCANETVHGVEFDFIPDVKGAVLVCDMSSNFLSKPVDVSKFGVIFAGAQKNVGPAGVTVVIVRDDLLGFALRECPSVLEYKVQAGNSSLYNTPPCFSIYVMGLVLEWIKNNGGAAAMEKLSSIKSQTIYEIIDNSQGFYVCPVEPQNRSKMNIPFRIGNAKGDDALEKRFLDKALELNMLSLKGHRSVGGIRASLYNAVTIEDVQKLAAFMKKFLEMHQL

SEQ ID NO: 435 - protein, 370 aa, synthetic construct
MDAPRQVVNFGPGPAKLPHSVLLEIQKELLDYKGVGISVLEMSHRSSDFAKIINNTENLVRELLAVPDNYKVIFLQGGGCGQFSAVPLNLIGLKAGRCADYVVTGAWSAKAAEEAKKFGTINIGHPKLGSYTKIPDPSTWNLNPDASYVYYCANETVHGVEFDFIPDVKGAVLVCDMSSNFLSKPVDVSKFGVIFAGAQKNVGSAGVTVVIVRDDLLGFALRECPSVLEYKVQAGNSSLYNTPPCFSIYVMGLVLEWIKNNGGAAAMEKLSSIKSQTIYEIIDNSQGFYVCPVEPQNRSKMNIPFRIGNAKGDDALEKRFLDKALELNMLSLKGHRSVGGIRASLYNAVTIEDVQKLAAFMKKFLEMHQL

SEQ ID NO: 436 - protein, 370 aa, synthetic construct
MDAPRQVVNFGPGPAKLPHSVLLEIQKELLDYKGVGISVLEMSHRSSDFAKIINNRENLVRELLAVPDNYKVIFLQGGGCGQFSAVPLNLIGLKAGRCADYVVTGAWSAKAAEEAKKFGTINIVHPKLGSYTKIPDPSTWNLNPDASYVYYCANETVHGVEFDFIPDVKGAVLVCDMSSNFLSKPVDVSKFGVIFAGAQKNVGSAGVTVVIVRDDLLGFALRECPSVLEYKVQAGNSSLYNTPPCFSIYVMGLVLEWIKNNGGAAAMEKLSSIKSQTIYEIIDNSQGFYVCPVEPQNRSKMNIPFRIGNAKGDDALEKRFLDKALELNMLSLKGHRSVGGIRASLYNAVTIEDVQKLAAFMKKFLEMHQL

SEQ ID NO: 437 - protein, 370 aa, synthetic construct
MDAPRQVVNFGPGPAKLPHSVLLEIQKELLDYKGVGISVLEMSHRSSDFAKIINNTENLVRELLAVPDNYKVIFLQGGGCGQFSAVPLNLIGLKAGRCADYVVTGAWSAKAAEEAKKFGTINIVHPKLGSYTKIPDPSTWNLNPDASYVYYCANETVRGVEFDFIPDVKGAVLVCDMSSNFLSKPVDVSKFGVIFAGAQKNVGSAGVTVVIVRDDLLGFALRECPSVLEYKVQAGNSSLYNTPPCFSIYVMGLVLEWIKNNGGAAAMEKLSSIKSQTIYEIIDNSQGFYVCPVEPQNRSKMNIPFRIGNAKGDDALEKRFLDKALELNMLSLKGHRSVGGIRASLYNAVTIEDVQKLAAFMKKFLEMHQL

SEQ ID NO: 438 - protein, 370 aa, synthetic construct
MDAPRQVVNFGPGPAKLPHSVLLEIQKELLDYKGVGISVLEMSHRSSDFAKIINNTENLVRELLAVPDNYKVIFLQGGGCGQFSAVPLNLIGLKAGRCADYVVTGAWSAKAAEEAKKFGTINIVHPKLGSYTKIPDPSTWNLNPDASYVYYCANETVHGVEFDFIPDVKGAVLVCDMSSNFLSKPVDVSKFGVIFAGAQKNVGSAGVTVVIVRDDLLGFALRECPSVLEYKVQAGNSSLYNTPPCFSIYVMGLVLEWIKNNGGAAAMEKLSSIKSQTIYEIIDNSQGFYVCPVEPQNRSKMNIPFRIGNAKGDDALEKRFLDKALELNILSLKGHRSVGGIRASLYNAVTIEDVQKLAAFMKKFLEMHQL

SEQ ID NO: 439 - protein, 370 aa, synthetic construct
MDAPRQVVNFGPGPAKLPHSVLLEIQKELLDYKGVGISVLEMSHRSSDFAKIINNTENLVRELLAVPDNYKVIFLQGGGCGQFSAVPLNLIGLKAGRCADYVVTGAWSAKAAEEAKKFGTINIVHPKLGSYTKIPDPSTWNLNPDASYVYYCANETVHGVEFDFIPDVKGAVLVCDMSSNFLSKPVDVSKFGVIFAGAQKNVGSAGVTVVIVRDDLLGFALRECPSVLEYKVQAGNSSLYNTPPCFSIYVMGLVLEWIKNNGGAAAMEKLSSIKSQTIYEIIDNSQGFYVCPVEPQNRSKMNIPFRIGNAKGDDALEKRFLDKALELNMLSLKGHRSVGGIRASLYDAVTIEDVQKLAAFMKKFLEMHQL

SEQ ID NO: 440 - protein, 370 aa, synthetic construct
MDAPRQVVNFGPGPAKLPHSVLLEIQKELLDYKGVGISVLEMSHRSSDFAKIINNTENLVRELLAVPDNYKVIFLQGGGCGQFSAVPLNLIGLKAGRCADYVVTGAWSAKAAEEAKKFGTINIVHPKLGSYTKIPDPSTWNLNPDASYVYYCANETVHGVDFDFIPDVKGAVLVCDMSSNFLSKPVDVSKFGVIFAGAQKNVGSAGVTVVIVRDDLLGFALRECPSVLEYKVQAGNSSLYNTPPCFSIYVMGLVLEWIKNNGGAAAMEKLSSIKSQTIYEIIDNSQGFYVCPVEPQNRSKMNIPFRIGNAKGDDALEKRFLDKALELNMLSLKGHRSVGGIRASLYNAVTIEDVQKLAAFMKKFLEMHQL

SEQ ID NO: 441 - protein, 370 aa, synthetic construct
MDAPRQVVNFGPGPAKLPHSVLLEIQKELLDYKGVGISVLEMSHRSSDFAKIINNTENLVRELLAVPDNYKVIFLQGGGCGQFSAVPLNLIGLKAGRCADYVVTGAWSAKAAEEAKKFGTINIVHPKLGSYTKIPDPSTWNLNPDASYVYYCANETVHGVEFDFIPDVKGAVLVCDMSSNFLSKPVDVSKFGVIFAGAQKNVGSAGVTVVIVRDDLLGFALRECPSVLEYKVQAGNSSLYNTPPCFSIYVMGLVLEWIKNNGGAAAMEKLSSIKSQTIYEIIDNSQGSYVCPVEPQNRSKMNIPFRIGNAKGDDALEKRFLDKALELNMLSLKGHRSVGGIRASLYNAVTIEDVQKLAAFMKKFLEMHQL

SEQ ID NO: 442 - protein, 370 aa, synthetic construct
MDAPRQVVNFGPGPAKLPHSVLLEIQKELLDYKGVGISVLEMSHRSSDFAKIINNTENLVRELLAVPDNYKVIFLQGGGCGQFSAVPLNLIGLKAGRCADYVVTGAWSAKAAEEAKKFGTINIVHPKLGSYTKIPDPSTWNLNPDASYVYYCANETVHGVEIDFIPDVKGAVLVCDMSSNFLSKPVDVSKFGVIFAGAQKNVGSAGVTVVIVRDDLLGFALRECPSVLEYKVQAGNSSLYNTPPCFSIYVMGLVLEWIKNNGGAAAMEKLSSIKSQTIYEIIDNSQGFYVCPVEPQNRSKMNIPFRIGNAKGDDALEKRFLDKALELNMLSLKGHRSVGGIRASLYNAVTIEDVQKLAAFMKKFLEMHQL

SEQ ID NO: 443 - protein, 370 aa, synthetic construct
MDAPRQVVNFGPGPAKLPHSVLLEIQKELLDYKGVGISVLEMSHRSSDFAKIINNTENLVRELLAVPDNYKVIFLQGGGCGQFSAVPLNLIGLKAGRCADYVVTGAWSAKAAEEAKKFGTINIVHPKLGSYTKIPDPSTWNLNPDASYVYYCANETVHGVEFDFIPDVKGAVLVCDMSSNFLSKPVDVSKFGVIFAGAQKNVGSAGVTVVIVRDDLLGFALRECPSVLEYKVQAGNSSLYNTPPCFSSYVMGLVLEWIKNNGGAAAMEKLSSIKSQTIYEIIDNSQGFYVCPVEPQNRSKMNIPFRIGNAKGDDALEKRFLDKALELNMLSLKGHRSVGGIRASLYNAVTIEDVQKLAAFMKKFLEMHQL

SEQ ID NO: 444 - protein, 370 aa, synthetic construct
MDAPRQVVNFGPGPAKLPHSVLLEIQKELLDYKGVGISVLEMSHRSSDFAKIINNTENLVRELLAVPDNYKVIFLQGGGCGQFSAVPLNLIGLKAGRCADYVVTGAWSAKAAEEAKKFGTINIVHPKLGSYTKIPDPSTWNLNPDASYVYYCANETVHGVEFDFIPDVKGAVLVCDMSSNFLSKPVDVSKFGVIFAGAQKNVGSAGVTVVIVRDDLLGFALRECPSVLEYKVQAGNSSLYNTPPCFSIYVMGLVLEWIKNNGGAAAMEKLSSIKSQTIYEIIDNSQGFYVCPVEPQNRSKMNIPFRIGNAKGDDALEKRFLDKALELNMLSLNGHRSVGGIRASLYNAVTIEDVQKLAAFMKKFLEMHQL

SEQ ID NO: 445 - protein, 370 aa, synthetic construct
MDAPRQVVNFGPGPAKLPHSVLLEIQKELLDYKGVGISVLEMSHRSSDFAKIINNTENLVRELLAVPDNYKVIFLQGGGCGQFSAVPLNLIGLKAGRCADYVVTGAWSAKAAEEAKKFGTINIVHPKLGSYTKIPDPSTWNLNPDASYVYYCANETVHGVEFDFIPDVKGAVLVCDMSSHFLSKPVDVSKFGVIFAGAQKNVGSAGVTVVIVRDDLLGFALRECPSVLEYKVQAGNSSLYNTPPCFSIYVMGLVLEWIKNNGGAAAMEKLSSIKSQTIYEIIDNSQGFYVCPVEPQNRSKMNIPFRIGNAKGDDALEKRFLDKALELNMLSLKGHRSVGGIRASLYNAVTIEDVQKLAAFMKKFLEMHQL

SEQ ID NO: 446 - protein, 370 aa, synthetic construct
MDAPRQVVNFGPGPAKLPHSVLLEIQKELLDYKGVGISVLEMSHRSSDFAKIINNTENLVRELLAVPDNYKVIFLQGGGCGQFSAVPLNLIGLKAGRCADYVVTGAWSAKAAEEAKKFGTINIVHPKLGSYTKIPDPSTWNLNPDASYVYYCANETVHGVEFDFIPDVKGAVLVCDMSSNFQSKPVDVSKFGVIFAGAQKNVGSAGVTVVIVRDDLLGFALRECPSVLEYKVQAGNSSLYNTPPCFSIYVMGLVLEWIKNNGGAAAMEKLSSIKSQTIYEIIDNSQGFYVCPVEPQNRSKMNIPFRIGNAKGDDALEKRFLDKALELNMLSLKGHRSVGGIRASLYNAVTIEDVQKLAAFMKKFLEMHQL

SEQ ID NO: 447 - protein, 370 aa, synthetic construct
MDAPRQVVNFGPGPAKLPHSVLLEIQKELLDYKGVGISVLEMSHRSSDFAKIINNTENLVLELLAVPDNYKVIFLQGGGCGQFSAVPLNLIGLKAGRCADYVVTGAWSAKAAEEAKKFGTINIVHPKLGSYTKIPDPSTWNLNPDASYVYYCANETVHGVEFDFIPDVKGAVLVCDMSSNFLSKPVDVSKFGVIFAGAQKNVGSAGVTVVIVRDDLLGFALRECPSVLEYKVQAGNSSLYNTPPCFSIYVMGLVLEWIKNNGGAAAMEKLSSIKSQTIYEIIDNSQGFYVCPVEPQNRSKMNIPFRIGNAKGDDALEKRFLDKALELNMLSLKGHRSVGGIRASLYNAVTIEDVQKLAAFMKKFLEMHQL

SEQ ID NO: 448 - protein, 370 aa, synthetic construct
MDAPRQVVNVGPGPAKLPHSVLLEIQKELLDYKGVGISVLEMSHRSSDFAKIINNTENLVRELLAVPDNYKVIFLQGGGCGQFSAVPLNLIGLKAGRCADYVVTGAWSAKAAEEAKKFGTINIVHPKLGSYTKIPDPSTWNLNPDASYVYYCANETVHGVEFDFIPDVKGAVLVCDMSSNFLSKPVDVSKFGVIFAGAQKNVGSAGVTVVIVRDDLLGFALRECPSVLEYKVQAGNSSLYNTPPCFSIYVMGLVLEWIKNNGGAAAMEKLSSIKSQTIYEIIDNSQGFYVCPVEPQNRSKMNIPFRIGNAKGDDALEKRFLDKALELNMLSLKGHRSVGGIRASLYNAVTIEDVQKLAAFMKKFLEMHQL

SEQ ID NO: 449 - protein, 370 aa, synthetic construct
MDAPRQVVNFGPGPAKLPHSVLLEIQKELLDYKGVGISVLEMSHRSSDFAKIINNTENLVRELLAVPDNYKVIFLQGGGCGQFSAVPLNLIGLKAGRCADYVVIGAWSAKAAEEAKKFGTINIVHPKLGSYTKIPDPSTWNLNPDASYVYYCANETVHGVEFDFIPDVKGAVLVCDMSSNFLSKPVDVSKFGVIFAGAQKNVGSAGVTVVIVRDDLLGFALRECPSVLEYKVQAGNSSLYNTPPCFSIYVMGLVLEWIKNNGGAAAMEKLSSIKSQTIYEIIDNSQGFYVCPVEPQNRSKMNIPFRIGNAKGDDALEKRFLDKALELNMLSLKGHRSVGGIRASLYNAVTIEDVQKLAAFMKKFLEMHQL

SEQ ID NO: 450 - protein, 370 aa, synthetic construct
MDAPRQVVNFGPGPPKLPHSVLLEIQKELLDYKGVGISVLEMSHRSSDFAKIINNTENLVRELLAVPDNYKVIFLQGGGCGQFSAVPLNLIGLKAGRCADYVVTGAWSAKAAEEAKKFGTINIVHPKLGSYTKIPDPSTWNLNPDASYVYYCANETVHGVEFDFIPDVKGAVLVCDMSSNFLSKPVDVSKFGVIFAGAQKNVGSAGVTVVIVRDDLLGFALRECPSVLEYKVQAGNSSLYNTPPCFSIYVMGLVLEWIKNNGGAAAMEKLSSIKSQTIYEIIDNSQGFYVCPVEPQNRSKMNIPFRIGNAKGDDALEKRFLDKALELNMLSLKGHRSVGGIRASLYNAVTIEDVQKLAAFMKKFLEMHQL

SEQ ID NO: 451 - protein, 370 aa, synthetic construct
MDAPRQVVNFGPGPAKLPHSVLLEIQKELLDYKGVGISVLEMSHRSSDFAKIINNTENLVRELLAVPDNYKVIFLQGGGCGQFSAVPLNLIGLKAGRCADYVVTGAWSAKAAEEAKKFGTINIVHPKLGSYTKIPDPSTWNLNPDASYVYYCANETVHGVEFDFIPDVKGAVLVCDMSSNFLSKPVDVSKFGVIFAGAQKNVGSAGVTVVIVRDDLLGFALRECPSVLEYKVQAGNSSLYNTPPCFSIYVMGLVLEWIKNNGGAAAMEKLSSIKSQTIYEIIDNSQGVYVCPVEPQNRSKMNIPFRIGNAKGDDALEKRFLDKALELNMLSLKGHRSVGGIRASLYNAVTIEDVQKLAAFMKKFLEMHQL

SEQ ID NO: 452 - protein, 370 aa, synthetic construct
MDAPRQVVNFGPGPAKLPHSVLLEIQKELLDYIGVGISVLEMSHRSSDFAKIINNTENLVRELLAVPDNYKVIFLQGGGCGQFSAVPLNLIGLKAGRCADYVVTGAWSAKAAEEAKKFGTINIVHPKLGSYTKIPDPSTWNLNPDASYVYYCANETVHGVEFDFIPDVKGAVLVCDMSSNFLSKPVDVSKFGVIFAGAQKNVGSAGVTVVIVRDDLLGFALRECPSVLEYKVQAGNSSLYNTPPCFSIYVMGLVLEWIKNNGGAAAMEKLSSIKSQTIYEIIDNSQGFYVCPVEPQNRSKMNIPFRIGNAKGDDALEKRFLDKALELNMLSLKGHRSVGGIRASLYNAVTIEDVQKLAAFMKKFLEMHQL

SEQ ID NO: 453 - protein, 370 aa, synthetic construct
MDAPRQVVNFGPGPAKLPHSVLLEIQKELLDYKGVGISVLEMSHRSSDFAKIINNTENLVRELLAVPDNYKVIFLQGGGCGQFSAVPLNLIGLKAGRCADYVVTGAWSAKAAEEAKKFGTINIVHPKLGSYTKIPDPSTWNLNPDASYVYYCANETVHGVEFDFIPDVKGAVLVCDMSSNFLSKPVDVSKFGVIFAGAQKNVGSAGVTVVIVRDDLLGFALRECPSVLEYKVQAGNSSLYNTPPCFSIYVMGLVLESIKNNGGAAAMEKLSSIKSQTIYEIIDNSQGFYVCPVEPQNRSKMNIPFRIGNAKGDDALEKRFLDKALELNMLSLKGHRSVGGIRASLYNAVTIEDVQKLAAFMKKFLEMHQL

SEQ ID NO: 454 - protein, 370 aa, synthetic construct
MDAPRQVVNFGPGPAKLPHSVLLEIQKELLDYKGVGISVLEMSHRSSDFAKIINNTENLVRELLAVPDNYKVIFLQGGGCGQFSAVPLNLIGLKAGRCADYVVTGAWSAKAAEEAKKFGTINIVHPKLGSYTKIPDPSTWNLNPDASYVYYCANETVHGVEFDFIPDVKGAVLVCDMSSNFLSKPVDVSKFGVIFAGAQKNVGSAGVTVVIVRDDLLGFALRECPSVLEYKVQAGNSSLYNTPPCFSIYVMGLVLEWIKNNGGAAAMEKLSSIESQTIYEIIDNSQGFYVCPVEPQNRSKMNIPFRIGNAKGDDALEKRFLDKALELNMLSLKGHRSVGGIRASLYNAVTIEDVQKLAAFMKKFLEMHQL

SEQ ID NO: 455 - protein, 370 aa, synthetic construct
MDAPRQVVNFGPGPAKLPHSVLLEIQKELLDYKGVGISVLEMSHRSSDFAKIINNTENLVRELLAVPDNYKVIFLQGGGCGQFSAVPLNLIGLKAGRCADYVVTGAWSAKAAEEAKKFGTINIVHPKLGSYTKIPDPSTWNLNPDASYVYYCANETVHGVEFDFIPDVKGAVLVCDMSSNFLSKPVDVSKFGVIFAGAQKNVGSAGVTVVIVRDDLLGFALRECPSVLEYKVQAGNSSLYNTPPCFSIYVMGLVLEWIKNNGGAAAKEKLSSIKSQTIYEIIDNSQGFYVCPVEPQNRSKMNIPFRIGNAKGDDALEKRFLDKALELNMLSLKGHRSVGGIRASLYNAVTIEDVQKLAAFMKKFLEMHQL

SEQ ID NO: 456 - protein, 370 aa, synthetic construct
MDAPRQVVNFGPGPAKLPHSVLLEIQKELLDYKGVGISVLEMSHRSSDFAKIINNTENLVRELLAVPDNYKVIFLQGGGCGQFSAVPLNLIGLKAGRCADYVVTGAWSAKAAEEAKKFGTINIVHPKLGSYTKIPDPSTWNLNPDASYVYYCANETVHGVEFDFIPDVKGAVLVCDMSSNFLSKPVDVSKFGVIFAGAQKNVGSAGVTVVIVRDDLLGFALRECPSVLEYKVQAGNSSLYNTPPCFSIYVMGLVLEWIKNNGGAAAMEKLSSIKSQTIYEIIDNSQGFYVCPVEPQNRSKMDIPFRIGNAKGDDALEKRFLDKALELNMLSLKGHRSVGGIRASLYNAVTIEDVQKLAAFMKKFLEMHQL

SEQ ID NO: 457 - protein, 370 aa, synthetic construct
MDAPRQVVNFGPGPAKLPHSVLLEIQKELLDYKGVGISVLEMSHRSSDFAKIINNTENLVRELLAVPDNYKVIFLQGGGCGQFSAVPLNLIGLKAGRCADYVVTGAWSAKAAEEAKKFGTINIVHPKLGSYTKIPDPSTWNLNPDASYVYYCANETVHGVEFDFIPDVKGAVLVCDMSSNFLSKPVDVSKFGVIFAGAQKNVGSAGVTVVIVRDDLLGFALRECPSVLEYKVQAGNSSLYNTPPCFSIYVMGLVLEWIKNNGGAAAMEKLSSIKSQTIYENIDNSQGFYVCPVEPQNRSKMNIPFRIGNAKGDDALEKRFLDKALELNMLSLKGHRSVGGIRASLYNAVTIEDVQKLAAFMKKFLEMHQL

SEQ ID NO: 458 - protein, 370 aa, synthetic construct
MDAPRQVVNFGPGPAKLPHSVLLEIQKELLDYKGVGISVLEMSHRSSDFAKIINNTENLVRELLAVPDNYKVIFLQGGGCGQFSAVPLNLIGLKAGRCADYVVTGAWSAKAAEEAKKFGTINIVHPKLGSYTKIPDPSTWNLNPDASYVYYCANETVHGVEFDFIPDVKGAVLVCDMSSNFLSKPVDVSKLGVIFAGAQKNVGSAGVTVVIVRDDLLGFALRECPSVLEYKVQAGNSSLYNTPPCFSIYVMGLVLEWIKNNGGAAAMEKLSSIKSQTIYEIIDNSQGFYVCPVEPQNRSKMNIPFRIGNAKGDDALEKRFLDKALELNMLSLKGHRSVGGIRASLYNAVTIEDVQKLAAFMKKFLEMHQL

SEQ ID NO: 459 - protein, 370 aa, synthetic construct
MDAPRQVVNFGPGPAKLPHSVLLEIQKELLDYKGVGISVLEMSHRSSDFAKIINNTENLVRELLAVPDNYKVIFLQGGACGQFSAVPLNLIGLKAGRCADYVVTGAWSAKAAEEAKKFGTINIVHPKLGSYTKIPDPSTWNLNPDASYVYYCANETVHGVEFDFIPDVKGAVLVCDMSSNFLSKPVDVSKFGVIFAGAQKNVGSAGVTVVIVRDDLLGFALRECPSVLEYKVQAGNSSLYNTPPCFSIYVMGLVLEWIKNNGGAAAMEKLSSIKSQTIYEIIDNSQGFYVCPVEPQNRSKMNIPFRIGNAKGDDALEKRFLDKALELNMLSLKGHRSVGGIRASLYNAVTIEDVQKLAAFMKKFLEMHQL

SEQ ID NO: 460 - protein, 370 aa, synthetic construct
MDAPRQVVNFGPGPAKLPHSVLLEIQKELLDYKGVGISVLEMSHRSSDFAKIINNTENLVRELLAVPDNYKVIFLQGGGCGQFSAVPLNLIGLKAGRCADYVVTGAWSAKAAEEAKKFGTINIVHPKLGSYTKIPDPSTWNLNPDASYVYYCANETVHGVEFDFIPDVKGAVLVCDMSSNFLSKPVDVSKFGVIFAGAQKNVGSAGVTVVIVRDDLLGFALRECPSVLEYKVQAGNSSLYNTPPCFSIYVMGLVLEWIKNNGGAAAMEKLSSIKSQTIYEIIDNSQGFYVCPVEPQNRSKMNIPFRIGNAKGDDALEKRFLDKALELNMLSLKGHRSVGGIRASLYTAVTIEDVQKLAAFMKKFLEMHQL

SEQ ID NO: 461 - protein, 370 aa, synthetic construct
MDAPRQVVNFGPGPAKLPHSVLLEIQKELLDYKGVGISVLEMSHRSSDFAKIINNTENLVRELLAVPDNYKVIFLQGGGCGQFSAVPLNLIGLKAGRCAGYVVTGAWSAKAAEEAKKFGTINIVHPKLGSYTKIPDPSTWNLNPDASYVYYCANETVHGVEFDFIPDVKGAVLVCDMSSNFLSKPVDVSKFGVIFAGAQKNVGSAGVTVVIVRDDLLGFALRECPSVLEYKVQAGNSSLYNTPPCFSIYVMGLVLEWIKNNGGAAAMEKLSSIKSQTIYEIIDNSQGFYVCPVEPQNRSKMNIPFRIGNAKGDDALEKRFLDKALELNMLSLKGHRSVGGIRASLYNAVTIEDVQKLAAFMKKFLEMHQL

SEQ ID NO: 462 - protein, 370 aa, synthetic construct
MDAPRQVVNFGPGPAKLPHSVLLEIQKELLDYKGVGISVLEMSHRSSDFAKIINNTENLVRELLAVPDNYKVIFLQGGGCGQFSAVPLNLIGLKAGRCADYVVTGAWSAKAAEEAKKFGTINIVHPKLGSYTKIPDPSTWNLNPDASYVYYCANETVHGVEFDFIPDVKGAVLVCDMSSNFLSKPVDVSKFGVIFAGAQKNVGSAGVTVVTVRDDLLGFALRECPSVLEYKVQAGNSSLYNTPPCFSIYVMGLVLEWIKNNGGAAAMEKLSSIKSQTIYEIIDNSQGFYVCPVEPQNRSKMNIPFRIGNAKGDDALEKRFLDKALELNMLSLKGHRSVGGIRASLYNAVTIEDVQKLAAFMKKFLEMHQL

SEQ ID NO: 463 - protein, 370 aa, synthetic construct
MDAPRQVVNFGPGPAKLPHSVLLEIQKELLDYKGVGISVLEMSHRSSDFAKIINNTENLVRELLAVPDNYKVIFLQGGGCGQFSAVPLNLIGLKAGRCADYVVTGAWSAKAAEEAKKFGTINIVHPKLGSYTKIPDPSTWNLNPDASYVYYCANETVHGVEFDFIPDVKGAVLVCDMSSNFLSKPVDVSKFGVIFAGAQKNVGSAGVTVVIVRDDLLGFALRECPSVLEYKVQAGNSSLYNTPPCFSIYVMGLVLEWIKNNGGAAAMEKLSSIKSQTIYEIIDNSQGFYVCPVEPQNRSKMNIPLRIGNAKGDDALEKRFLDKALELNMLSLKGHRSVGGIRASLYNAVTIEDVQKLAAFMKKFLEMHQL

SEQ ID NO: 464 - protein, 370 aa, synthetic construct
MDAPRQVVNFGPGPAKLPHSVLLEIQKELLDYKGVGISVLEMSHRSSDFAKIINNTENLVRELLAVPDNYKVIFLQGGGCGQCSAVPLNLIGLKAGRCADYVVTGAWSAKAAEEAKKFGTINIVHPKLGSYTKIPDPSTWNLNPDASYVYYCANETVHGVEFDFIPDVKGAVLVCDMSSNFLSKPVDVSKFGVIFAGAQKNVGSAGVTVVIVRDDLLGFALRECPSVLEYKVQAGNSSLYNTPPCFSIYVMGLVLEWIKNNGGAAAMEKLSSIKSQTIYEIIDNSQGFYVCPVEPQNRSKMNIPFRIGNAKGDDALEKRFLDKALELNMLSLKGHRSVGGIRASLYNAVTIEDVQKLAAFMKKFLEMHQL

SEQ ID NO: 465 - protein, 370 aa, synthetic construct
MDAPRQVVNFGPGPAKLPHSVLLEIQKELLDYKGVGISVLEMSHRSSDFAKIINNTENLVRELLAVPDNYKVIFLQGGGCGQFSAVPLNLIGLKAGRCADYVVTGAWSAKAAEEAKKFGTINIVHPKLGSYTKIPDPSTWNLNPDASYVYYCANETVHGVEFDFIPDVKGAVLVCDMSSNFLSKPVDVSKFGVIFAGAQKNVGSAGVTVVIVRDDLLGFALRECPSVLEYKVQAGNSSLYNTPPCFSIYVMGLVLEWIKNNGGAAAMEKLSSIKSQTIYEIIDNSQGFYVCPVEPQNRSKMNIPFRIGNAKGDDALEKRFLDKALELNMLSLKGHRSVGGIRASLYNAVTIEDVQKLAAFMKKFLKMHQL

SEQ ID NO: 466 - protein, 370 aa, synthetic construct
MDAPRQVVNFGPGPAKLPHSVLLEIQKELLDYKGVGISVLEMSHRSSDFAKIINNTENLVRELLAVPDNYKVIFLQGGGCGQFSAVPLNLIGLKAGRCADYVVTGAWSAKAAEEAKKFGTINIVHPKLGSYTKIPDPSTWNLNPDASYVYYCANETVHGVEFDFIPDVKGAVLVCDMSSNFLSKPVDVSKFGVIFAGAQKNVGSAGVTVVIVRDDLLGFALRECPSVLEYKVQAGNSSLYNTPPCFSIYVMGLVLEWIKNNGGAAAMEKLSSIKSQTIYEIIDNSQGFYVCPVEPQNRSKMNTPFRIGNAKGDDALEKRFLDKALELNMLSLKGHRSVGGIRASLYNAVTIEDVQKLAAFMKKFLEMHQL

SEQ ID NO: 467 - protein, 370 aa, synthetic construct
MDAPRQVVNFGPGPAKLPHSVLLEIQKELLDYKGVGISVLEMSHRSSDFAKIINNTENLVRELLAVPDNYKVIFLQGGGCGQFSAVPLNLIGLKAGRCADYVVTGAWSAKAAEEAKKFGTINIVHPKLGSYTKIPDPSTWNLNPDASYVYYCANETVHGVEFDFIPDVKGAVLVCDMSSNFPSKPVDVSKFGVIFAGAQKNVGSAGVTVVIVRDDLLGFALRECPSVLEYKVQAGNSSLYNTPPCFSIYVMGLVLEWIKNNGGAAAMEKLSSIKSQTIYEIIDNSQGFYVCPVEPQNRSKMNIPFRIGNAKGDDALEKRFLDKALELNMLSLKGHRSVGGIRASLYNAVTIEDVQKLAAFMKKFLEMHQL

SEQ ID NO: 468 - protein, 370 aa, synthetic construct
MDAPRQVVNFGPGPAKLPHSVLLEIQKELLDYKGVGISVLEMSHRSSDFAKIINNTENLVRELLAVPDNYKVIFLQGGGCGQFSAVPLNLIGLKAGRCADYVVTGAWSAKAAEEAKKFGTINIVHPKLGSYTKIPDPSTWNLNPDASYVYYCANETVHGVEFDFIPDVKGAVLVCDMSSNFLSKPVDVSKFGVIFAGAQKNVGSAGVTVVIVRDDLLGFALRECPSVLEYKVQAGNSSLYNTPPCFSIYVMGLVLEWIKNNGGAAAMEKLSSIKSQTIYEIIDNSQGFYVSPVEPQNRSKMNIPFRIGNAKGDDALEKRFLDKALELNMLSLKGHRSVGGIRASLYNAVTIEDVQKLAAFMKKFLEMHQL

SEQ ID NO: 469 - protein, 370 aa, synthetic construct
MDAPRQVVNFGPGPAKLPHSVLLEIQKELLDYKGVGISVLEMSHRSSDFAKIINNTENLVRELLAVPDNYKVIFLQGGGCGQFSAVPLNLIGLKAGRCADYVVTGAWSAKAAEEAKKFGTINIVHPKLGSYTKIPDPSTWNLNPDASYVYYCANETVHGVEFDFIPDVKGAVLVCDMSSNFLSKPEDVSKFGVIFAGAQKNVGSAGVTVVIVRDDLLGFALRECPSVLEYKVQAGNSSLYNTPPCFSIYVMGLVLEWIKNNGGAAAMEKLSSIKSQTIYEIIDNSQGFYVCPVEPQNRSKMNIPFRIGNAKGDDALEKRFLDKALELNMLSLKGHRSVGGIRASLYNAVTIEDVQKLAAFMKKFLEMHQL

SEQ ID NO: 470 - protein, 370 aa, synthetic construct
MDAPRQVVNFGPGPAKLPHSVLLEIQKELLDYKGVGISVLEMSHRSSDFAKIINNTENLVRELLAVPDNYKVIFLQGGGCGQFSAVPLNLIGLKAGRCADYVVTGAWSAKAAEEAKKFGTINIVHPKLGSYTKIPDPSTWNLNPDASYVYYCANETVHGVEFDFIPDVKGAVLVCDMSSNFLSKPVDVSKFGVIFAGAQKNVGSAGVTVVIVRDDLLGFALRECPSVLEYKVQAGNSSLYNTPPCFSIYVMGLVLEWIKNNGGAAAMEKLSSIKSQTIYEIIDNSQGFYVCPLEPQNRSKMNIPFRIGNAKGDDALEKRFLDKALELNMLSLKGHRSVGGIRASLYNAVTIEDVQKLAAFMKKFLEMHQL

SEQ ID NO: 471 - protein, 370 aa, synthetic construct
MDAPRQVVNFGPGPAKLPHSVLLEIQKELLDYKGVGISVLEMSHRSSDFAKIINNTENLVRELLAVPDNYKVIFLQGGGCGQFSAVPLNLIGLKAGRCADYVVTGAWSAKAAEEAKKFGTINIVHPKLGSYTKIPDPSTWNLNPDASYVYYCANETVHGVEFDFIPDVKGAVLVCDMSSNFLSKPVDVSKFGVIFAGAQKNVGSAGVTVVIVRDDLLGFALRECPSVLEYKVQAGNSSLYNTPPCFSIYVMGLVLEWIKNNGGAAAMEKLSSIKSQTIYEIIDNSQGFYVCPVEPQNRSKMNIPFRIGNAKGDDALEKRFLDKALELNVLSLKGHRSVGGIRASLYNAVTIEDVQKLAAFMKKFLEMHQL

SEQ ID NO: 472 - protein, 370 aa, synthetic construct
MDAPRQVVNFGPGPAKLPHSVLLEIQKELLDYKGVGISVLEMSHRSSDFAKIINNTENLVRELLAVPDNYKVIFLQGGGCGQFSAVPLNLIGLKAGRCADYVVTGAWSAKAAEEAKKFGTINIVHPKLGSYTKIPDPSTWNLNPDASYVYYCANETVHGVEFDFIPDVKGAVLVCDMSSNFLSKPVDVSKFGVIFAGAQKNVGSAGVTVVIVRDDLLGFALRECPSVLEYKVQAGNSSLYNTPPCFSIYVMGLVLEWIKNNGGAAAMEKLSSIKSQTIYEIIDNSQGFYVCPVEPQNRSKMNIPFRIGNAKGDDASEKRFLDKALELNMLSLKGHRSVGGIRASLYNAVTIEDVQKLAAFMKKFLEMHQL

SEQ ID NO: 473 - protein, 370 aa, synthetic construct
MDAPRQVVNFGPGPAKLPHSVLLEIQKELLDYKGVGISVLEMSHRSSDFAKIINNTENLVRELLAVPDNYKVIFLQGGGCGQFSAVPLNLIGLKAGRCADYVVTGAWSAKAAEEAKKFGTINIVHPKLGSYTKIPDPSTWNLNPDASYVYYCANETVHGVEFDFIPDVKGAVLVCDMSSNFLSKPVDVSKFGVIFAGAQKNVGSAGVTVVIVRDDLLGFALRECPSVLEYKVQAGNSSLYNTPPCFSIYVMGLVLEWIKNNGGAAAMEKLSSIKSQTIYESIDNSQGFYVCPVEPQNRSKMNIPFRIGNAKGDDALEKRFLDKALELNMLSLKGHRSVGGIRASLYNAVTIEDVQKLAAFMKKFLEMHQL

SEQ ID NO: 474 - protein, 370 aa, synthetic construct
MDAPRQVVNFGPGPAKLPHSVLLEIQKELLDYKGVGISVLEMSHRSSDFAKIINNTENLVRELLAVPDNYKVIFLQGGGCGQFSAVPLNLIGLKAGRCADYVVTGAWSAKAAEEAKKFGTINIVHPKLGSYTKIPDPSTWNLNPDASYVYYCANETVHGVESDFIPDVKGAVLVCDMSSNFLSKPVDVSKFGVIFAGAQKNVGSAGVTVVIVRDDLLGFALRECPSVLEYKVQAGNSSLYNTPPCFSIYVMGLVLEWIKNNGGAAAMEKLSSIKSQTIYEIIDNSQGFYVCPVEPQNRSKMNIPFRIGNAKGDDALEKRFLDKALELNMLSLKGHRSVGGIRASLYNAVTIEDVQKLAAFMKKFLEMHQL

SEQ ID NO: 475 - protein, 370 aa, synthetic construct
MDAPRQVVNFGPGPAKLPHSVLLEIQKELLDYKGVGISVLEMSHRSSDFAKIINNTENLVRELLAVPDNYKVIFLQGGGCGQFSAVPLNLIGLKAGRCADYVVTGAWSAKAAEEAKKFGTINIVHPKLGSYTKIPDPSTWNLNPDASYVYYCANETVHGVEFHFIPDVKGAVLVCDMSSNFLSKPVDVSKFGVIFAGAQKNVGSAGVTVVIVRDDLLGFALRECPSVLEYKVQAGNSSLYNTPPCFSIYVMGLVLEWIKNNGGAAAMEKLSSIKSQTIYEIIDNSQGFYVCPVEPQNRSKMNIPFRIGNAKGDDALEKRFLDKALELNMLSLKGHRSVGGIRASLYNAVTIEDVQKLAAFMKKFLEMHQL

SEQ ID NO: 476 - protein, 370 aa, synthetic construct
MDAPRQVVNFGPGPAKLPHSVLLEIQKELLDYKGVGISVLEMSHRSSDFAKIINNTENLVRELLAVPDNYKVIFLQGGGCGQFSAVPLNLIGLKAGRCAVYVVTGAWSAKAAEEAKKFGTINIVHPKLGSYTKIPDPSTWNLNPDASYVYYCANETVHGVEFDFIPDVKGAVLVCDMSSNFLSKPVDVSKFGVIFAGAQKNVGSAGVTVVIVRDDLLGFALRECPSVLEYKVQAGNSSLYNTPPCFSIYVMGLVLEWIKNNGGAAAMEKLSSIKSQTIYEIIDNSQGFYVCPVEPQNRSKMNIPFRIGNAKGDDALEKRFLDKALELNMLSLKGHRSVGGIRASLYNAVTIEDVQKLAAFMKKFLEMHQL

SEQ ID NO: 477 - protein, 370 aa, synthetic construct
MDAPRQVVNFGPGPAKLPHSVLLEIQKELLDYKGVGISVLEMSHRSSDFAKIINNTENLVRELLAVPDNYKVIFLQGGGCGQFSAVPLNLIGLKAGRCADYVVTGAWSAKAAEEAKKFGTINIVHPKLGSYTKIPDPSTWNLNPDASYVYYCANETVHGVEFDFIPDVKGAVLVCDMSSNFLSKPVDVSKFGVIFAGAQKNVGSAGVTVVIVRDDLLGFALRECPSVLEYKVQAGNSSLYNTPPCFSIYVMGLVLEWIKNNGGAAAMEKLSSIKSQTIYEIIDNSQGIYVCPVEPQNRSKMNIPFRIGNAKGDDALEKRFLDKALELNMLSLKGHRSVGGIRASLYNAVTIEDVQKLAAFMKKFLEMHQL

SEQ ID NO: 478 - protein, 370 aa, synthetic construct
MDAPRQVVNFGPGPAKLPHSVLLEIQKELLDYKGVGISVLEMSHRSSDFAKIINNTENLVRELLAVPDNYKVIFLQGGGCGQFSAVPLNLIGLKAGRCADYVVTGAWSAKAAEEAKKFGTINIVHPKLGSYTKIPDPSTWNLNPDASYVYYCANETVHGVEFDFIPDVKGAVLVCDMSSNFLSKPVDVSKFGVIFAGAQKNVGSAGVTVVIVRDDLLGFALRECPSVLEYKVQAGNSSLYNTPPCFSIYVMGLVLEWIKNNGGAAAREKLSSIKSQTIYEIIDNSQGFYVCPVEPQNRSKMNIPFRIGNAKGDDALEKRFLDKALELNMLSLKGHRSVGGIRASLYNAVTIEDVQKLAAFMKKFLEMHQL

SEQ ID NO: 479 - protein, 370 aa, synthetic construct
MDAPRQVVNFGPGPAKLPHSVLLEIQKELLDYKGVGISVLEMSHRSSDFAKIINNTENLVRELLAVPDNYKVIFLQGGGCGQFSAVPLNLIGLKAGRCADYVVTGAWSAKAAEEAKKFGTINIVHPKLGSYTKIPDPSTWNLNPDASYVYYCANETVHGVEFDFIPDVKGAVLVCDMSSNFLSKPVDVSKFGVIFAGAQKNVGSAGVTVVIVRDDLLGFALRECPSVLEYKVQAGNSSLYNTPPCFSIYVMGLVLEWIKNNGGAAAMEKLSSIKSQTIYEIIDNSQGFYVCPVEPQNRSKMNIPFRIGNAKGDDALEKRFLDKALELNMLSLKGHRSVGGIRASLYNGVTIEDVQKLAAFMKKFLEMHQL

SEQ ID NO: 480 - protein, 370 aa, synthetic construct
MDAPRQVVNFGPGPAKLPHSVLLEIQKELLDYKGVGISVLEMSHRSSDFAKIINNTENLVRELLAVPDNYKVIFLQGGGCGQFSAVPLNLIGLKAGRCADYVVTGAWSAKAAEEAKKFGTINIVHPKLGSYTKIPDPSTWNLNPDASYVYYCANETVHGVEFDFIPDVKGAVLVCDMSSNFLSKPVDVSKFGVIFAGAQKNVGSAGVTVVIVRDDLLGFALRECPSVLEYKVQAGNSSLYNTPPCFSIYVMGLVLEWIKNNGGAAAMEKLSSIKSQTIYEIIVNSQGFYVCPVEPQNRSKMNIPFRIGNAKGDDALEKRFLDKALELNMLSLKGHRSVGGIRASLYNAVTIEDVQKLAAFMKKFLEMHQL

SEQ ID NO: 481 - protein, 370 aa, synthetic construct
MDAPRQVVNFGPGPAKLPHSVLLEIQKELLDYKGVGISVLEMSHRSSDFAKIINNTENLVRELLAVPDNYKVIFLQGGGCGQFSAVPLNLIGLKAGRCGDYVVTGAWSAKAAEEAKKFGTINIVHPKLGSYTKIPDPSTWNLNPDASYVYYCANETVHGVEFDFIPDVKGAVLVCDMSSNFLSKPVDVSKFGVIFAGAQKNVGSAGVTVVIVRDDLLGFALRECPSVLEYKVQAGNSSLYNTPPCFSIYVMGLVLEWIKNNGGAAAMEKLSSIKSQTIYEIIDNSQGFYVCPVEPQNRSKMNIPFRIGNAKGDDALEKRFLDKALELNMLSLKGHRSVGGIRASLYNAVTIEDVQKLAAFMKKFLEMHQL

SEQ ID NO: 482 - protein, 370 aa, synthetic construct
MDAPRQVVNFGPGPAKLPHSVLLEIQKELLDYKGVGISVLEMSHRSSDFAKIINNTENLVRELLAVPDNYKVIFLQGGGCGQFSAVPLNLIGLKAGRCADYVVTGAWSAKAAEEAKKFGTINIVHPKLGSYTKIPDPSTWNLNPDASYVYYCANETVHGVEFDFIPDVKGAVLVCDMSSNFLSKPVDVSKFGVIFAGAQKNVGFAGVTVVIVRDDLLGFALRECPSVLEYKVQAGNSSLYNTPPCFSIYVMGLVLEWIKNNGGAAAMEKLSSIKSQTIYEIIDNSQGFYVCPVEPQNRSKMNIPFRIGNAKGDDALEKRFLDKALELNMLSLKGHRSVGGIRASLYNAVTIEDVQKLAAFMKKFLEMHQL

SEQ ID NO: 483 - protein, 370 aa, synthetic construct
MDAPRQVVNFGPGPAKLPHSVLLEIQKELLDYKGVGISVLEMSHRSSDFAKIINNTENLVRELLAVRDNYKVIFLQGGGCGQFSAVPLNLIGLKAGRCADYVVTGAWSAKAAEEAKKFGTINIVHPKLGSYTKIPDPSTWNLNPDASYVYYCANETVHGVEFDFIPDVKGAVLVCDMSSNFLSKPVDVSKFGVIFAGAQKNVGSAGVTVVIVRDDLLGFALRECPSVLEYKVQAGNSSLYNTPPCFSIYVMGLVLEWIKNNGGAAAMEKLSSIKSQTIYEIIDNSQGFYVCPVEPQNRSKMNIPFRIGNAKGDDALEKRFLDKALELNMLSLKGHRSVGGIRASLYNAVTIEDVQKLAAFMKKFLEMHQL

SEQ ID NO: 484 - protein, 370 aa, synthetic construct
MDAPGQVVNFGPGPAKLPHSVLLEIQKELLDYKGVGISVLEMSHRSSDFAKIINNTENLVRELLAVPDNYKVIFLQGGGCGQFSAVPLNLIGLKAGRCADYVVTGAWSAKAAEEAKKFGTINIVHPKLGSYTKIPDPSTWNLNPDASYVYYCANETVHGVEFDFIPDVKGAVLVCDMSSNFLSKPVDVSKFGVIFAGAQKNVGSAGVTVVIVRDDLLGFALRECPSVLEYKVQAGNSSLYNTPPCFSIYVMGLVLEWIKNNGGAAAMEKLSSIKSQTIYEIIDNSQGFYVCPVEPQNRSKMNIPFRIGNAKGDDALEKRFLDKALELNMLSLKGHRSVGGIRASLYNAVTIEDVQKLAAFMKKFLEMHQL

SEQ ID NO: 485 - protein, 370 aa, synthetic construct
MDAPRQVVNFGPGPAKLPHSVLLEIQKELLDYKGVGISVLEMSHRSSDFAKIINNTENLVRELLAVPDNYKVIFLQGGGCGQFSAVPLNLIGLKAGRCADYVVTGAWSAKAAEEAKKFGTINIVHPKLGSYTKIPDPSTWNLNPDASYVYYCANETVHGVEFDFIPDVKGAVLVCDMSSNFLSKPVDVSKFGVIFAGAQKNVGSAGVTVVIVRDDLLGFALRECLSVLEYKVQAGNSSLYNTPPCFSIYVMGLVLEWIKNNGGAAAMEKLSSIKSQTIYEIIDNSQGFYVCPVEPQNRSKMNIPFRIGNAKGDDALEKRFLDKALELNMLSLKGHRSVGGIRASLYNAVTIEDVQKLAAFMKKFLEMHQL

SEQ ID NO: 486 - protein, 370 aa, synthetic construct
MDAPRQVVNFGPGPAKLPHSVLLEIQKELLDYKGVGISVLEMSHRSSDFAKIINNTENLVRELLAVPDNYKVIFLQGGGCGQFSAVPLNLIGLKAGRCADYVVTGAWSAKAAEEAKKFGTINIVHPKLGSYTKIPDPSTWNLNPDASYVYYCANETVHGVEFDFIPDVKGAVLVCDMSSNFLSKPVDVSKFGVIFAGAQKNVGSAGVTVVIVRDDLLGFALRECPSVLEHKVQAGNSSLYNTPPCFSIYVMGLVLEWIKNNGGAAAMEKLSSIKSQTIYEIIDNSQGFYVCPVEPQNRSKMNIPFRIGNAKGDDALEKRFLDKALELNMLSLKGHRSVGGIRASLYNAVTIEDVQKLAAFMKKFLEMHQL

SEQ ID NO: 487 - protein, 370 aa, synthetic construct
MDAPRQVVNFGPGPAKMPHSVLLEIQKELLDYKGVGISVLEMSHRSSDFAKIINNTENLVRELLAVPDNYKVIFLQGGGCGQFSAVPLNLIGLKAGRCADYVVTGAWSAKAAEEAKKFGTINIVHPKLGSYTKIPDPSTWNLNPDASYVYYCANETVHGVEFDFIPDVKGAVLVCDMSSNFLSKPVDVSKFGVIFAGAQKNVGSAGVTVVIVRDDLLGFALRECPSVLEYKVQAGNSSLYNTPPCFSIYVMGLVLEWIKNNGGAAAMEKLSSIKSQTIYEIIDNSQGFYVCPVEPQNRSKMNIPFRIGNAKGDDALEKRFLDKALELNMLSLKGHRSVGGIRASLYNAVTIEDVQKLAAFMKKFLEMHQL

SEQ ID NO: 488 - protein, 370 aa, synthetic construct
MDAPRQVVNFGPGPAKLPHSVLLEIQKELLDYKGVGISVLEMSHRSSDFAKIINNTENLVRELLAVPDNYKVIFLQGGGCGQFSAVPLNLIGLKAGRCADYVVTGAWSAKAAEEAKKFGTINIFHPKLGSYTKIPDPSTWNLNPDASYVYYCANETVHGVEFDFIPDVKGAVLVCDMSSNFLSKPVDVSKFGVIFAGAQKNVGSAGVTVVIVRDDLLGFALRECPSVLEYKVQAGNSSLYNTPPCFSIYVMGLVLEWIKNNGGAAAMEKLSSIKSQTIYEIIDNSQGFYVCPVEPQNRSKMNIPFRIGNAKGDDALEKRFLDKALELNMLSLKGHRSVGGIRASLYNAVTIEDVQKLAAFMKKFLEMHQL

SEQ ID NO: 489 - protein, 370 aa, synthetic construct
MDAPRQVVNFGPGPAKLPHSVLLEIQKELLDYKGVGISVLEMSHRSSDFAKIINNTENLVRELLAVPDNYKVIFLQGGGCGQFSAVPLNLIGLKAGRCADYVVTGAWSAKAAEEAKKFGTINIVHPKLGSYTKIPDPSTWNLNPDASYVYYCANETVHGVECDFIPDVKGAVLVCDMSSNFLSKPVDVSKFGVIFAGAQKNVGSAGVTVVIVRDDLLGFALRECPSVLEYKVQAGNSSLYNTPPCFSIYVMGLVLEWIKNNGGAAAMEKLSSIKSQTIYEIIDNSQGFYVCPVEPQNRSKMNIPFRIGNAKGDDALEKRFLDKALELNMLSLKGHRSVGGIRASLYNAVTIEDVQKLAAFMKKFLEMHQL

SEQ ID NO: 490 - protein, 370 aa, synthetic construct
MDAPRQVVNFGPGPAKLPHSVLLEIQKELLDYKGVGISVLEMSHRSSDFAKIINNTENLVRELLAVPDNYKVIFLQGGGCGQFSAVPLNLIGLKAGRCADYLVTGAWSAKAAEEAKKFGTINIVHPKLGSYTKIPDPSTWNLNPDASYVYYCANETVHGVEFDFIPDVKGAVLVCDMSSNFLSKPVDVSKFGVIFAGAQKNVGSAGVTVVIVRDDLLGFALRECPSVLEYKVQAGNSSLYNTPPCFSIYVMGLVLEWIKNNGGAAAMEKLSSIKSQTIYEIIDNSQGFYVCPVEPQNRSKMNIPFRIGNAKGDDALEKRFLDKALELNMLSLKGHRSVGGIRASLYNAVTIEDVQKLAAFMKKFLEMHQL

SEQ ID NO: 491 - protein, 370 aa, synthetic construct
MDAPRQVVNFGPGPAKLPHSVLLEIQKELLDYKGVGISVLEMSHRSSDFAKIINNTENLVRELLAVPDNYKVIFLQGGGCGQFSAVPLNLIGLKAGRCADYVVTGAWSAKAAEEAKKFGTINIVHPKLGSYTKFPDPSTWNLNPDASYVYYCANETVHGVEFDFIPDVKGAVLVCDMSSNFLSKPVDVSKFGVIFAGAQKNVGSAGVTVVIVRDDLLGFALRECPSVLEYKVQAGNSSLYNTPPCFSIYVMGLVLEWIKNNGGAAAMEKLSSIKSQTIYEIIDNSQGFYVCPVEPQNRSKMNIPFRIGNAKGDDALEKRFLDKALELNMLSLKGHRSVGGIRASLYNAVTIEDVQKLAAFMKKFLEMHQL

SEQ ID NO: 492 - protein, 370 aa, synthetic construct
MDAPRQVVNFGPGPAKLPHSVLLEIQKELLDYKGVGISVLEMSHRSSDFAKIINNTENLVRELLAVPDNYKVIFLQGGGCGQFSAVPLNLIGLKAGRCADYVVTGAWSAKAAEEAKKFGTINIVHPKLGSYTKIPDPSTWNLNPDASYVYYCANETVHGVEFDFIPDVKGAVLVCDMSSNFLSKPVDVSKFGVIFAGAQKNVGSAGVTVVIVRDDLLGFALRECPSVLEYKVQAGNSSLYNTPPCFSIYVMGLVLEWIKNNGGAAAMEKLSSIKSQTFYEIIDNSQGFYVCPVEPQNRSKMNIPFRIGNAKGDDALEKRFLDKALELNMLSLKGHRSVGGIRASLYNAVTIEDVQKLAAFMKKFLEMHQL

SEQ ID NO: 493 - protein, 370 aa, synthetic construct
MDAPRQVVNFGPGPAKLPHSVLLEIQKELLDYKGVGISVLEMSHRSSDFAKIINNTENLVRELLAVPDNYKVIFLQEGGCGQFSAVPLNLIGLKAGRCADYVVTGAWSAKAAEEAKKFGTINIVHPKLGSYTKIPDPSTWNLNPDASYVYYCANETVHGVEFDFIPDVKGAVLVCDMSSNFLSKPVDVSKFGVIFAGAQKNVGSAGVTVVIVRDDLLGFALRECPSVLEYKVQAGNSSLYNTPPCFSIYVMGLVLEWIKNNGGAAAMEKLSSIKSQTIYEIIDNSQGFYVCPVEPQNRSKMNIPFRIGNAKGDDALEKRFLDKALELNMLSLKGHRSVGGIRASLYNAVTIEDVQKLAAFMKKFLEMHQL

SEQ ID NO: 494 - protein, 370 aa, synthetic construct
MDAPRQVVNFGPGPAKLPHSGLLEIQKELLDYKGVGISVLEMSHRSSDFAKIINNTENLVRELLAVPDNYKVIFLQGGGCGQFSAVPLNLIGLKAGRCADYVVTGAWSAKAAEEAKKFGTINIVHPKLGSYTKIPDPSTWNLNPDASYVYYCANETVHGVEFDFIPDVKGAVLVCDMSSNFLSKPVDVSKFGVIFAGAQKNVGSAGVTVVIVRDDLLGFALRECPSVLEYKVQAGNSSLYNTPPCFSIYVMGLVLEWIKNNGGAAAMEKLSSIKSQTIYEIIDNSQGFYVCPVEPQNRSKMNIPFRIGNAKGDDALEKRFLDKALELNMLSLKGHRSVGGIRASLYNAVTIEDVQKLAAFMKKFLEMHQL

SEQ ID NO: 495 - protein, 370 aa, synthetic construct
MDAPRQVVNFGPGPAKLPHSVLLEIQKELLDYKGVGISVLEMSHRSSDFAKIINNTENLVRELLAVPDNYKVIFLQGGGCGQFSAVPLNLIGLKAGRCADYVVTGAWSAKAAEEAKKFGTINIVHPKLGSYTKIPDPSTWNLNPDASYVYYCANETVHGAEFDFIPDVKGAVLVCDMSSNFLSKPVDVSKFGVIFAGAQKNVGSAGVTVVIVRDDLLGFALRECPSVLEYKVQAGNSSLYNTPPCFSIYVMGLVLEWIKNNGGAAAMEKLSSIKSQTIYEIIDNSQGFYVCPVEPQNRSKMNIPFRIGNAKGDDALEKRFLDKALELNMLSLKGHRSVGGIRASLYNAVTIEDVQKLAAFMKKFLEMHQL

SEQ ID NO: 496 - protein, 370 aa, synthetic construct
MDAPRQVVNFGPGPAKLPHSVLLEIQKELLDYKGVGISVLEMSHRSSDFAKIINNTENLVRELLAVPDNYKVIFLQGGGCGQFSAVPLNLIGLKAGRCADYVVTGAWSAKAAEEAKKFGTINIVHPKLGSYTKIPDPSTWNLNPDASYVYYCANETVHGVEFDFIPDVKGAVLVCDMSSNFLSKPVDVSKFGVIFAGAQKNVGSAGVTGVIVRDDLLGFALRECPSVLEYKVQAGNSSLYNTPPCFSIYVMGLVLEWIKNNGGAAAMEKLSSIKSQTIYEIIDNSQGFYVCPVEPQNRSKMNIPFRIGNAKGDDALEKRFLDKALELNMLSLKGHRSVGGIRASLYNAVTIEDVQKLAAFMKKFLEMHQL

SEQ ID NO: 497 - protein, 370 aa, synthetic construct
MDAPRQVVNFGPGPAKLPHSVLLEIQKELLDYKGVGISVLEMSHRSSDFAKIINNTENLVRELLAVPDNYKVIFLQGGGCGQFSAVPLNLIGLKAGRCADYVVTGAWSAKAAEEAKKFGTINIVHPKLGSYTKIPDPSTWNLNPDASYVYYCANETVHGVEFDFIPDVKGAVLVCDMSSNFLSKPVDVSKFGVIFAGAQKNVGSAGVTVVIVRDDLLGFALRECPSVLEYKVQAGNSSLYNTPPCFSIYVMGLVLEWIKNNGGAAAMEKLSSIKSQTIYEIIDNSQGLYVCPVEPQNRSKMNIPFRIGNAKGDDALEKRFLDKALELNMLSLKGHRSVGGIRASLYNAVTIEDVQKLAAFMKKFLEMHQL

SEQ ID NO: 498 - protein, 370 aa, synthetic construct
MDAPRQVVNFGPGPAKLPHSVLLEIQKELLDYKGVGISVLEMSHRSSDFAKIINNTENLVRELLAVPDNYKVIFLQGGGCGQFSAVPLNLIGLKAGRCADYVVTGAWSAKAAEEAKKFGTINIVHPKLGSYTKIPDPSTWNLNPDASYVYYCANETVHGVEFDFIPDVKGAVLVCDMSSNFLSKPVDVSKFGVIFAGAQKNVGSAGVTVVIVRDDLLGFALRECPSVLEYKVQAGNSSLYNTPPCFSIYVMGLVLEWIKNNGGAAAMEKLSSIKSQTIYEIIDNSQGFYVCPVEPQNRSKMNIPFRIGNAKGDDALEKRFLDKALELNMLSLKGHRSVGGIRASLYNAVTIEDVQKLAASMKKFLEMHQL

SEQ ID NO: 499 - protein, 370 aa, synthetic construct
MDAPRQVVNFGPGPAKLPHSVLLEIQKELLDYKGVGISVLEMSHRSSDFAKIINNTENLVRELLAVPDNYKVIFLQGGGCGQFSAVPLNLIGLKAGRCADYVVTGAWSAKAAEEAKKFGTINIVHPKLGSYTKIPDPSTWNLNPDASYVYYCANETVHGVEFDFIPDVKGAVLVCDMSSNFLSKPVDVSKFGVIFAGAQKNVGSAGVTVVIVRDDLLGFALRERPSVLEYKVQAGNSSLYNTPPCFSIYVMGLVLEWIKNNGGAAAMEKLSSIKSQTIYEIIDNSQGFYVCPVEPQNRSKMNIPFRIGNAKGDDALEKRFLDKALELNMLSLKGHRSVGGIRASLYNAVTIEDVQKLAAFMKKFLEMHQL

SEQ ID NO: 500 - protein, 370 aa, synthetic construct
MDAPRQVVNFGPGPAKLPHSVLLEIQKELLDYKGVGISVLEMSHRSSDFAKIINNTENLVRELLAVPDNYKVIFLQGGGCGQFSAVPLNLIGLKAGRCADYVVTGAWSAKAAEEAKKFGTINIVHPKLGSYTKIPDPSTWNLNPDASYVYYCANETVHGVEFDFIPDVKGAVLVCDMSSNLLSKPVDVSKFGVIFAGAQKNVGSAGVTVVIVRDDLLGFALRECPSVLEYKVQAGNSSLYNTPPCFSIYVMGLVLEWIKNNGGAAAMEKLSSIKSQTIYEIIDNSQGFYVCPVEPQNRSKMNIPFRIGNAKGDDALEKRFLDKALELNMLSLKGHRSVGGIRASLYNAVTIEDVQKLAAFMKKFLEMHQL

SEQ ID NO: 501 - protein, 370 aa, synthetic construct
MDAPRQVVNFGPGPAKLPHSVLLEIQKELLDYKGVGISVLEMSHRSSDFAKIINNTENLVRELLAVPDNYKVIFLQGGGCGQFSAVPLNLIGLKAGRCADYVVTGAWSAKAAEEAKKFGTINIVHPKLGSYTKIPDPSTWNLNPDASYVYYCANETVHGVEFDFIPDVKGAVLVCDMSSNFLSKPVDVSKFGVIFAGAQKNVGSAGVTVVIVRDDLLGFALRECPSVLECKVQAGNSSLYNTPPCFSIYVMGLVLEWIKNNGGAAAMEKLSSIKSQTIYEIIDNSQGFYVCPVEPQNRSKMNIPFRIGNAKGDDALEKRFLDKALELNMLSLKGHRSVGGIRASLYNAVTIEDVQKLAAFMKKFLEMHQL

SEQ ID NO: 502 - protein, 370 aa, synthetic construct
MDAPRQVVNFGPGPAKLPHSVLLEIQKELLDYKGVGISVLEMSHRSSDFAKIINNTENLVRELLAVPDNYKVIFLQGGGCGQFSAVPLHLIGLKAGRCADYVVTGAWSAKAAEEAKKFGTINIVHPKLGSYTKIPDPSTWNLNPDASYVYYCANETVHGVEFDFIPDVKGAVLVCDMSSNFLSKPVDVSKFGVIFAGAQKNVGSAGVTVVIVRDDLLGFALRECPSVLEYKVQAGNSSLYNTPPCFSIYVMGLVLEWIKNNGGAAAMEKLSSIKSQTIYEIIDNSQGFYVCPVEPQNRSKMNIPFRIGNAKGDDALEKRFLDKALELNMLSLKGHRSVGGIRASLYNAVTIEDVQKLAAFMKKFLEMHQL

SEQ ID NO: 503 - protein, 370 aa, synthetic construct
MDAPRQVVNFGPGPAKLPHSVLLEIQKELLDYKGVGISVLEMSHRSSDFAKIINNTENLVRELLAVPDNYKVIFLQGGGCGQFSAVPLNLIGLKAGRCADYVVTGAWSAKAAEEAKKFGTINIVHPKLGSYTKIPDPSTWNLNPDASYVYYCANETVHGVEFDFIPDVKGAVLVCDMSSNFLSKPVDVFKFGVIFAGAQKNVGSAGVTVVIVRDDLLGFALRECPSVLEYKVQAGNSSLYNTPPCFSIYVMGLVLEWIKNNGGAAAMEKLSSIKSQTIYEIIDNSQGFYVCPVEPQNRSKMNIPFRIGNAKGDDALEKRFLDKALELNMLSLKGHRSVGGIRASLYNAVTIEDVQKLAAFMKKFLEMHQL

SEQ ID NO: 504 - protein, 370 aa, synthetic construct
MDAPRQVVNFGPGPAKLPHSVLLEIQKELLDYKGVGISVLEMSHRSSDFAKIINNTENLVRELLAVPDNYKVIFLQGGGCGQFSAVPLNLIGLKAGRCADYVVTGAWSAKAAEEAKKFGTINIVHPKLGSYTKIPDPSTWNLNPDASYVYYCANETVHGVEFDFIPDVKGAVLVCDMSSNFLSKPVDVSKFGVIFAGAQKNVGSAGVTVVIVRDDLLGFALRECPSVLEYKVQAGNSSLYNTPPCFSIYVMGLVLEWIKNNGGAAAMEKLSSIKSQTIYEIMDNSQGFYVCPVEPQNRSKMNIPFRIGNAKGDDALEKRFLDKALELNMLSLKGHRSVGGIRASLYNAVTIEDVQKLAAFMKKFLEMHQL

SEQ ID NO: 505 - protein, 370 aa, synthetic construct
MDAPRQVVNFGPGPAKLPHSVLLEIQKELLDYKGVGISVLEMSHRSSDFAKIINNTENLVRELLAVPDNYKVIFLQGGGCGQFSAVPLNLIGLKAGRCADYVVTGAWSAKAAEEAKKFGTINIVHPKLGSYTKIPDPSTWNLNPDASYVYYCANETVHGVEFDFIPDVKGAVLVCDMSSNFLSKPVDVSKCGVIFAGAQKNVGSAGVTVVIVRDDLLGFALRECPSVLEYKVQAGNSSLYNTPPCFSIYVMGLVLEWIKNNGGAAAMEKLSSIKSQTIYEIIDNSQGFYVCPVEPQNRSKMNIPFRIGNAKGDDALEKRFLDKALELNMLSLKGHRSVGGIRASLYNAVTIEDVQKLAAFMKKFLEMHQL

SEQ ID NO: 506 - protein, 370 aa, synthetic construct
MDAPRQVVNFGPGPAKLPHSVLLEIQKELLDYKGVGISVLEMSHRSSDFAKIINNTENLVRELLAVPDNYKVIFLQGGGCGQFSAVPLNLIGLKAGRCADYVVTGAWSAKAAEEAKKFGTINIVHPKLGSYTKIPDPSTWNLNPDASYVYYCANETVHGVEFDFIPDVKGAVLVCDMSSNFLSKPVDVSKFGVIFAGAQKNVGSAGVTVVIVRDDLLGFALRECPSVLEYKVQAGNSSLYNTPPCFSIYVMGLVLEWIKNNGGAAAMEKLSSIKSQTIYEIIDNSQGFYVCPVEPQNRSKMNIPFRIGNAKGDAALEKRFLDKALELNMLSLKGHRSVGGIRASLYNAVTIEDVQKLAAFMKKFLEMHQL

SEQ ID NO: 507 - protein, 370 aa, synthetic construct
MDAPRQVVNFGPGPAKLPHSVLLEIQKELLDYKGVGISVLEMSHRSSDFAKIINNTENLVRELLAVPDNYKVIFVQGGGCGQFSAVPLNLIGLKAGRCADYVVTGAWSAKAAEEAKKFGTINIVHPKLGSYTKIPDPSTWNLNPDASYVYYCANETVHGVEFDFIPDVKGAVLVCDMSSNFLSKPVDVSKFGVIFAGAQKNVGSAGVTVVIVRDDLLGFALRECPSVLEYKVQAGNSSLYNTPPCFSIYVMGLVLEWIKNNGGAAAMEKLSSIKSQTIYEIIDNSQGFYVCPVEPQNRSKMNIPFRIGNAKGDDALEKRFLDKALELNMLSLKGHRSVGGIRASLYNAVTIEDVQKLAAFMKKFLEMHQL

SEQ ID NO: 508 - protein, 370 aa, synthetic construct
MDAPRQVVNCGPGPAKLPHSVLLEIQKELLDYKGVGISVLEMSHRSSDFAKIINNTENLVRELLAVPDNYKVIFLQGGGCGQFSAVPLNLIGLKAGRCADYVVTGAWSAKAAEEAKKFGTINIVHPKLGSYTKIPDPSTWNLNPDASYVYYCANETVHGVEFDFIPDVKGAVLVCDMSSNFLSKPVDVSKFGVIFAGAQKNVGSAGVTVVIVRDDLLGFALRECPSVLEYKVQAGNSSLYNTPPCFSIYVMGLVLEWIKNNGGAAAMEKLSSIKSQTIYEIIDNSQGFYVCPVEPQNRSKMNIPFRIGNAKGDDALEKRFLDKALELNMLSLKGHRSVGGIRASLYNAVTIEDVQKLAAFMKKFLEMHQL

SEQ ID NO: 509 - protein, 370 aa, synthetic construct
MDAPRQVVNFGPGPAKLPHSVLLEIQKELLDYKGVGISVLEMSHRSSDFAKIINNTENLVRELLAVPDNYKVIFLQGGGCGQFSAVPLNLIGLKAGRCADYVVTGAWSAKAAEEAKKFGTINIVHPKLGSYTKIPDPSTWNLNPDASYVYYCANETVHGVEFDFIPDVKGAVLVCDMCSNFLSKPVDVSKFGVIFAGAQKNVGSAGVTVVIVRDDLLGFALRECPSVLEYKVQAGNSSLYNTPPCFSIYVMGLVLEWIKNNGGAAAMEKLSSIKSQTIYEIIDNSQGFYVCPVEPQNRSKMNIPFRIGNAKGDDALEKRFLDKALELNMLSLKGHRSVGGIRASLYNAVTIEDVQKLAAFMKKFLEMHQL

SEQ ID NO: 510 - protein, 370 aa, synthetic construct
MDAPRQVVNFGPGPAKLPHLVLLEIQKELLDYKGVGISVLEMSHRSSDFAKIINNTENLVRELLAVPDNYKVIFLQGGGCGQFSAVPLNLIGLKAGRCADYVVTGAWSAKAAEEAKKFGTINIVHPKLGSYTKIPDPSTWNLNPDASYVYYCANETVHGVEFDFIPDVKGAVLVCDMSSNFLSKPVDVSKFGVIFAGAQKNVGSAGVTVVIVRDDLLGFALRECPSVLEYKVQAGNSSLYNTPPCFSIYVMGLVLEWIKNNGGAAAMEKLSSIKSQTIYEIIDNSQGFYVCPVEPQNRSKMNIPFRIGNAKGDDALEKRFLDKALELNMLSLKGHRSVGGIRASLYNAVTIEDVQKLAAFMKKFLEMHQL

SEQ ID NO: 511 - protein, 370 aa, synthetic construct
MDAPRQVVNFGPGPAKLPHSVLLEIQKELLDYKGVGISVLEMSHRSSDFAKIINNPENLVRELLAVPDNYKVIFLQGGGCGQFSAVPLNLIGLKAGRCADYVVTGAWSAKAAEEAKKFGTINIVHPKLGSYTKIPDPSTWNLNPDASYVYYCANETVHGVEFDFIPDVKGAVLVCDMSSNFLSKPVDVSKFGVIFAGAQKNVGSAGVTVVIVRDDLLGFALRECPSVLEYKVQAGNSSLYNTPPCFSIYVMGLVLEWIKNNGGAAAMEKLSSIKSQTIYEIIDNSQGFYVCPVEPQNRSKMNIPFRIGNAKGDDALEKRFLDKALELNMLSLKGHRSVGGIRASLYNAVTIEDVQKLAAFMKKFLEMHQL

SEQ ID NO: 512 - protein, 370 aa, synthetic construct
MDAPRQVVNFGPGPAKLPHSVLLEIQKELLDYKGVGISVLEMSHRSSDFAKIINNTENLVRELLAVADNYKVIFLQGGGCGQFSAVPLNLIGLKAGRCADYVVTGAWSAKAAEEAKKFGTINIVHPKLGSYTKIPDPSTWNLNPDASYVYYCANETVHGVEFDFIPDVKGAVLVCDMSSNFLSKPVDVSKFGVIFAGAQKNVGSAGVTVVIVRDDLLGFALRECPSVLEYKVQAGNSSLYNTPPCFSIYVMGLVLEWIKNNGGAAAMEKLSSIKSQTIYEIIDNSQGFYVCPVEPQNRSKMNIPFRIGNAKGDDALEKRFLDKALELNMLSLKGHRSVGGIRASLYNAVTIEDVQKLAAFMKKFLEMHQL

SEQ ID NO: 513 - protein, 370 aa, synthetic construct
MDAPRQVVNFGPGPAKLPHSVLLEIQKELLDYKGVGISVLEMSHRSSDFAKIINNTENLVRELLAVPDNYKVIFLQGGGCGQFSAVPLNLIGLKAGRCADYVVTGAWSAKAAEEAKKFGTINIVHPKLGSYTKIPDPSTWNLNPDASYVYYCANETVHGVEFDFIPDVKGAVLVCDMSSNFLSKPVDVSKFGVIFAGAQKNVGSAGVTVVIVRDDLLGFALRECPSVLEYKVQAGNSSLYNTPPCFSIYVMGLVLEWIKNNGGAAAMEKLSSIKSQTIYEIIDNSQGFYVCPVEPQNRSKMNIPFGIGNAKGDDALEKRFLDKALELNMLSLKGHRSVGGIRASLYNAVTIEDVQKLAAFMKKFLEMHQL

SEQ ID NO: 514 - protein, 370 aa, synthetic construct
MDAPRQVVNFGPGPAKLPHSVLLEIQKELLDYKGVGISVLEMSHRSSDFAKIINNTENLVRELLAVPDIYKVIFLQGGGCGQFSAVPLNLIGLKAGRCADYVVTGAWSAKAAEEAKKFGTINIVHPKLGSYTKIPDPSTWNLNPDASYVYYCANETVHGVEFDFIPDVKGAVLVCDMSSNFLSKPVDVSKFGVIFAGAQKNVGSAGVTVVIVRDDLLGFALRECPSVLEYKVQAGNSSLYNTPPCFSIYVMGLVLEWIKNNGGAAAMEKLSSIKSQTIYEIIDNSQGFYVCPVEPQNRSKMNIPFRIGNAKGDDALEKRFLDKALELNMLSLKGHRSVGGIRASLYNAVTIEDVQKLAAFMKKFLEMHQL

SEQ ID NO: 515 - protein, 370 aa, synthetic construct
MDAPRQVVNFGPGPAKLPHSVLLEIQKELLDYKGVGISVLEMSHRSSDFAKIINNTENLVRELLAVPDNYKVIFLQGGGCGQFSAVPLNLIGLKAGRCADYVVTGAWSAKAAEEAKKFGTINIVHPKLGSYTKIPDPSTWNLNPDASYVYYCANETVHGVEFDFIPDVKGAVLVCDMSSNFLSKPVDVSKFGVIFAGAQKNVGSAGVTVVIVRDDLLGFALRECPSVLEYKVQAGNSSLYNTPPCFSIYVMGLVLEWTKNNGGAAAMEKLSSIKSQTIYEIIDNSQGFYVCPVEPQNRSKMNIPFRIGNAKGDDALEKRFLDKALELNMLSLKGHRSVGGIRASLYNAVTIEDVQKLAAFMKKFLEMHQL

SEQ ID NO: 516 - protein, 370 aa, synthetic construct
MDAPRQVVNFGPGPAKLPHSVLLEIQKELLDYKGVGISVLEMSHRSSDFAKIINNTENLVRELLAVPDNYKVIFLQGGGCGQFSAVPLNLIGLKAGRCADYVVTGAWSAKAAEEAKKFGTINIVHPKLGSYTKMPDPSTWNLNPDASYVYYCANETVHGVEFDFIPDVKGAVLVCDMSSNFLSKPVDVSKFGVIFAGAQKNVGSAGVTVVIVRDDLLGFALRECPSVLEYKVQAGNSSLYNTPPCFSIYVMGLVLEWIKNNGGAAAMEKLSSIKSQTIYEIIDNSQGFYVCPVEPQNRSKMNIPFRIGNAKGDDALEKRFLDKALELNMLSLKGHRSVGGIRASLYNAVTIEDVQKLAAFMKKFLEMHQL

SEQ ID NO: 517 - protein, 370 aa, synthetic construct
MDAPRQVVNFGPGPAKLPHSVLLEIQKELLDYKGVGISVLEMSHRSSDFAKIINNTENLVRELLAVPDNYKVIFLQGGGCGQFSAVPLNLIGLKAGRCADYVVTGAWSAKAAEEAKKFGTINIVHPKLGSYTKIPDPSTWNLNPDASYVYYCANETVHGVEFDFIPDVKGAVLVCDMSSNFLSKPVDVSEFGVIFAGAQKNVGSAGVTVVIVRDDLLGFALRECPSVLEYKVQAGNSSLYNTPPCFSIYVMGLVLEWIKNNGGAAAMEKLSSIKSQTIYEIIDNSQGFYVCPVEPQNRSKMNIPFRIGNAKGDDALEKRFLDKALELNMLSLKGHRSVGGIRASLYNAVTIEDVQKLAAFMKKFLEMHQL

SEQ ID NO: 518 - protein, 370 aa, synthetic construct
MDAPRQVVNFGPGPAKLPHSVLLEIQKELLDYKGVGISVLEMSHRSSDFAKIINNTKNLVRELLAVPDNYKVIFLQGGGCGQFSAVPLNLIGLKAGRCADYVVTGAWSAKAAEEAKKFGTINIVHPKLGSYTKIPDPSTWNLNPDASYVYYCANETVHGVEFDFIPDVKGAVLVCDMSSNFLSKPVDVSKFGVIFAGAQKNVGSAGVTVVIVRDDLLGFALRECPSVLEYKVQAGNSSLYNTPPCFSIYVMGLVLEWIKNNGGAAAMEKLSSIKSQTIYEIIDNSQGFYVCPVEPQNRSKMNIPFRIGNAKGDDALEKRFLDKALELNMLSLKGHRSVGGIRASLYNAVTIEDVQKLAAFMKKFLEMHQL

SEQ ID NO: 519 - protein, 370 aa, synthetic construct
MDAPRQVVNFGPGPAKLPHSVLLEIQKELLDYKGVGISVLEMSHRSSDFAKIINNTENLVRELLAVPDNYKVIFLQGGGCGQFSAVPLNLIGLKAGRCADYVVTGAWSAKAAEEAKKFGTINIVHPKLGSYTKIPDPSTWNLNPDASYVYYCANETVHGVEFDFIPDVKGAVLVCDMSTNFLSKPVDVSKFGVIFAGAQKNVGSAGVTVVIVRDDLLGFALRECPSVLEYKVQAGNSSLYNTPPCFSIYVMGLVLEWIKNNGGAAAMEKLSSIKSQTIYEIIDNSQGFYVCPVEPQNRSKMNIPFRIGNAKGDDALEKRFLDKALELNMLSLKGHRSVGGIRASLYNAVTIEDVQKLAAFMKKFLEMHQL

SEQ ID NO: 520 - protein, 370 aa, synthetic construct
MDAPRQVVNFGPGPAKLPHSVLLEIQKELLDYKGVGISVLEMSHRSSDFAKIINNTENLVRELLAVPDNYKVIFLQGGGCGQFSAVPLNLIGLKAGRCADYVVTGAWSAKAAEEAKKFGTINIVHAKLGSYTKIPDPSTWNLNPDASYVYYCANETVHGVEFDFIPDVKGAVLVCDMSSNFLSKPVDVSKFGVIFAGAQKNVGSAGVTVVIVRDDLLGFALRECPSVLEYKVQAGNSSLYNTPPCFSIYVMGLVLEWIKNNGGAAAMEKLSSIKSQTIYEIIDNSQGFYVCPVEPQNRSKMNIPFRIGNAKGDDALEKRFLDKALELNMLSLKGHRSVGGIRASLYNAVTIEDVQKLAAFMKKFLEMHQL

SEQ ID NO: 521 - protein, 370 aa, synthetic construct
MDAPRQVVNFGPGPAKLPHSVLLEIQKELLDYKGVGISVLEMSHRSSDFAKIINNTENLVRELLAVPDNYKVIFLQGGGCGQFSAVPLNLIGLKAGRCADYVVTGAWSAKAAEEAKKFGTINIVHPKLGSYTKIPDPSTWNLNPDASYVYYCANETVHGVEFDFIPDVKGAVLVCDMSSNFLSKPVDVSKFGVIFAGAQKNVGSAGVTVVIVRDDLLGFALRECPSVLEYKVQAGNSSLYNTPPCFSIYVMGLVLEWIKNNGGAAAMEKLSSIKSQTIYEIIDNSQGFYVCPVEPQNRSKMNIPYRIGNAKGDDALEKRFLDKALELNMLSLKGHRSVGGIRASLYNAVTIEDVQKLAAFMKKFLEMHQL

SEQ ID NO: 522 - protein, 370 aa, synthetic construct
MDAPRQVVNFGPGPAKLPHSVLLEIQKELLDYKGVGISVLEMSHRSSDFAKIINNTENLVRELLAVPDNYKVIFLQGGGCGQFSAVPLNLIGLKAGRCADYVVTGAWSAKAAEEAKKFGTINIVHPKLGSYTKIPDPSTWNLNPDASYVYYCANETVLGVEFDFIPDVKGAVLVCDMSSNFLSKPVDVSKFGVIFAGAQKNVGSAGVTVVIVRDDLLGFALRECPSVLEYKVQAGNSSLYNTPPCFSIYVMGLVLEWIKNNGGAAAMEKLSSIKSQTIYEIIDNSQGFYVCPVEPQNRSKMNIPFRIGNAKGDDALEKRFLDKALELNMLSLKGHRSVGGIRASLYNAVTIEDVQKLAAFMKKFLEMHQL

SEQ ID NO: 523 - protein, 370 aa, synthetic construct
MDAPRQVVNFGPGPAKLPHSVLLEIQKELLDYKGVGISVLEMSHRSSDFAKIINNTENLVRELLAVPDNYKVIFLQGGGCGQFSAVPLNLIGLKAGRCADYVVTGAWSAKAAEEAKKFGTINIVHPKLGSYTKIPDPSTWNLNPDASYVYYCANETVHGVEFDFIPDVKGAVLVCDMSSNFLSKPVDVSKFGVIFAGAQKNVGSAGVTVVIVRDDLLGFALRECPSVLEYKVQAGNSSLYNTPPCFSIYVMGLVLEWIKNNGGAAAMEKLSSIKSQTIYEIIDNSQGFYVCPVEPQNRSKMNIPFRIGNAKGDDALEKRFLDKALELNMLSLKGYRSVGGIRASLYNAVTIEDVQKLAAFMKKFLEMHQL

SEQ ID NO: 524 - protein, 370 aa, synthetic construct
MDAPRQVVNFGPGPAKLPHSVLLEIQKELLDYKGVGISVLEMSHRSSDFAKIINNTENLVRELLAVPDNYKVIFLQGGGCGQFSAVPLNLIGLKAGRCADYVVTGAWSAKAAEEAKKFGTINIVHPKLGSYTKIPDPSTWNLNPDASYVYYCANETVHGVEFDFIPDVKGAVLVCDMSSNFLSKPVDVSKFGVIFAGAQKNVGSAGVTVVIVRDDLLGFALRECPSVLEYKVQAGNSSLYNTPPCFSIYVMGLVLEWIKNNGGAAAMEKLSSIKSQTIYEIIDNSQGFYVCPVEPQNRSKMNIPFRIGNAKGDDALEKRFLDKALELNMLSLKGHRSVGGLRASLYNAVTIEDVQKLAAFMKKFLEMHQL

SEQ ID NO: 525 - protein, 370 aa, synthetic construct
MDAPRQVVNFGPGPAKLPHSVLLEIQKELLDYKGVGISVLEMSHRSSDFAKIINNTENLVRELLAVPDNYKVIFLQGGGCGQFSAVPLNLIGLKAGRCADYVVTGAWSAKAAEEAKKFGTINIVHPKLGSYTKIPDPSTWNLNPDASYVYYCANETVHGVEFDFIPDVKGAVLVCDMSSNFLSKPVDVSKFGVIFAGAQKNVGSAGVTVVIVRDDLLGFALRECPSVLEYKVQAGNSSLYNTPPCFSIYVMGLVLEWIKNNGGAAAMEKLSSIKSQTIYEIIDNSQGFYVCPVEPQNRSKMNIPVRIGNAKGDDALEKRFLDKALELNMLSLKGHRSVGGIRASLYNAVTIEDVQKLAAFMKKFLEMHQL

SEQ ID NO: 526 - protein, 370 aa, synthetic construct
MDAPRQVVNFGPGPAKLPHSVLLEIQKELLDYKGVGISVLEMSHRSSDFAKIINNTENLVRELLAVPDNYKVIFLQGGGCGQFSAVPLNLIGLKAGRCADYVVTGAWSAKAAEEAKKFGTINIVHPKLGSYTKIPDPSTWNLNPDASYVYYCANETVHGVEFDFIPDVKGAVLVCDMSSNFLSKPVDVSKFGVIFAGAQKNVGSAGVTVVIVRDDLLGFALRECPSVLEYKVQAGNSSLYNTPPCFSIYVMGLVLEWIKNNGGAAAMEKLSSIKSQTIYEIIDNSQGFYVCPVEPQNRSKMNIPFRIGNAKGDDALKKRFLDKALELNMLSLKGHRSVGGIRASLYNAVTIEDVQKLAAFMKKFLEMHQL

SEQ ID NO: 527 - protein, 370 aa, synthetic construct
MDAPRQVVNFGPGPAKLPHSVLLEIQKELLDYKGVGISVLEMSHRSSDFAKIINNTENLVRELLAVPDNYKVIFLQGGGCGQFSAVPLNLIGLKAGRCADYVVTGAWSAKAAEEAKKFGTINIVHPKLGSYTKIPDPSTWNLNPDASYVYYCANETVHGVEFDFIPDVKGAVLVCDMSSNFLSKPVDVSKFGVIFAGAQKNVGSAGVTVVIVRDDLLGFALRECPSVLEYKVQAGNSSLYNTPPCFSIYVMGLVLEWIKNNGGAAAMEKLSSIKSQRIYEIIDNSQGFYVCPVEPQNRSKMNIPFRIGNAKGDDALEKRFLDKALELNMLSLKGHRSVGGIRASLYNAVTIEDVQKLAAFMKKFLEMHQL

SEQ ID NO: 528 - protein, 370 aa, synthetic construct
MDAPRQVVNFGPGPAKLPHSVLLEIQKELLDYKGVGISVLEMSHRSSDFAKIINNTENLVRELLAVPDNYKVIFLQGGGCGQISAVPLNLIGLKAGRCADYVVTGAWSAKAAEEAKKFGTINIVHPKLGSYTKIPDPSTWNLNPDASYVYYCANETVHGVEFDFIPDVKGAVLVCDMSSNFLSKPVDVSKFGVIFAGAQKNVGSAGVTVVIVRDDLLGFALRECPSVLEYKVQAGNSSLYNTPPCFSIYVMGLVLEWIKNNGGAAAMEKLSSIKSQTIYEIIDNSQGFYVCPVEPQNRSKMNIPFRIGNAKGDDALEKRFLDKALELNMLSLKGHRSVGGIRASLYNAVTIEDVQKLAAFMKKFLEMHQL

SEQ ID NO: 529 - protein, 370 aa, synthetic construct
MDAPRQVVNFGPGPAKLPHSVLLEIQKELLDYKGVGISVLEMSHRSSDFAKIINNTENLVRELLAVPDNYKVIFLQGGGCGQFSAVSLNLIGLKAGRCADYVVTGAWSAKAAEEAKKFGTINIVHPKLGSYTKIPDPSTWNLNPDASYVYYCANETVHGVEFDFIPDVKGAVLVCDMSSNFLSKPVDVSKFGVIFAGAQKNVGSAGVTVVIVRDDLLGFALRECPSVLEYKVQAGNSSLYNTPPCFSIYVMGLVLEWIKNNGGAAAMEKLSSIKSQTIYEIIDNSQGFYVCPVEPQNRSKMNIPFRIGNAKGDDALEKRFLDKALELNMLSLKGHRSVGGIRASLYNAVTIEDVQKLAAFMKKFLEMHQL

SEQ ID NO: 530 - protein, 370 aa, synthetic construct
MDAPRQVVNFGPGPAKLPHSVLLEIQKELLDYKGVGISVLEMSHRSSDFAKIINNTENLVRELLAVPDNYKVIFLQGGGCGQFSAVPLNLIGLKAGRCADYVVTGAWSAKAAEEAKKFGTINIVHPKLGSYTKIPDPSTWNLNPDASYVYYCANETVHGVEFDFIPDVKGAVLVCDMSSNFLSKPVDVSKFGVIFAGAQKNVGSAGVTVVIVRDDLLGFALRECPSVLEYKVQAGNSSLYNTPLCFSIYVMGLVLEWIKNNGGAAAMEKLSSIKSQTIYEIIDNSQGFYVCPVEPQNRSKMNIPFRIGNAKGDDALEKRFLDKALELNMLSLKGHRSVGGIRASLYNAVTIEDVQKLAAFMKKFLEMHQL

SEQ ID NO: 531 - protein, 370 aa, synthetic construct
MDAPRQVVNFGPGPAKLPHSVLLEIQKELLDYKGVGISVLEMSHRSSDFAKIINNTENLVRELLAVPDNYKVIFLQGGGCGQVSAVPLNLIGLKAGRCADYVVTGAWSAKAAEEAKKFGTINIVHPKLGSYTKIPDPSTWNLNPDASYVYYCANETVHGVEFDFIPDVKGAVLVCDMSSNFLSKPVDVSKFGVIFAGAQKNVGSAGVTVVIVRDDLLGFALRECPSVLEYKVQAGNSSLYNTPPCFSIYVMGLVLEWIKNNGGAAAMEKLSSIKSQTIYEIIDNSQGFYVCPVEPQNRSKMNIPFRIGNAKGDDALEKRFLDKALELNMLSLKGHRSVGGIRASLYNAVTIEDVQKLAAFMKKFLEMHQL

SEQ ID NO: 532 - protein, 370 aa, synthetic construct
MDAPRQVVNFGPGPAKLPHSVLLEIQKELLDYKGVGISVLEMSHRSSDCAKIINNTENLVRELLAVPDNYKVIFLQGGGCGQFSAVPLNLIGLKAGRCADYVVTGAWSAKAAEEAKKFGTINIVHPKLGSYTKIPDPSTWNLNPDASYVYYCANETVHGVEFDFIPDVKGAVLVCDMSSNFLSKPVDVSKFGVIFAGAQKNVGSAGVTVVIVRDDLLGFALRECPSVLEYKVQAGNSSLYNTPPCFSIYVMGLVLEWIKNNGGAAAMEKLSSIKSQTIYEIIDNSQGFYVCPVEPQNRSKMNIPFRIGNAKGDDALEKRFLDKALELNMLSLKGHRSVGGIRASLYNAVTIEDVQKLAAFMKKFLEMHQL

SEQ ID NO: 533 - protein, 370 aa, synthetic construct
MDAPRQVVNFGPGPAKLPHSVLLEIQKELLDYKGVGISVLEMSHRSSDFAKIINNTENLVRELLAVPDNYKVIFLQGGGCGQFSAVPLNLIGLKAGRCADYVVTGAWSAKAAEEAKKFGTINIVHPKLGSYTKIPDPSTWNLNPDASYVYYCANETVHGVEFDFIPDVKGAVLVCDMSSNFLSKPVGVSKFGVIFAGAQKNVGSAGVTVVIVRDDLLGFALRECPSVLEYKVQAGNSSLYNTPPCFSIYVMGLVLEWIKNNGGAAAMEKLSSIKSQTIYEIIDNSQGFYVCPVEPQNRSKMNIPFRIGNAKGDDALEKRFLDKALELNMLSLKGHRSVGGIRASLYNAVTIEDVQKLAAFMKKFLEMHQL

SEQ ID NO: 534 - protein, 370 aa, synthetic construct
MDAPRQVVNFGPGPAKLPHSVLLEIQKELLDYKGVGISVLEMSHRSSDFAKIINNTENLVRELLAVPDNYKVIFLQGGGCGQFSAVPLNLIGLKAGRCADYVVTGAWSAKAAEEAKKFGTINIVHPKLGSYTKIPDPSTWNLNPDASYVYYCANETVHGVEFDFIPDVKGAVLVCDMSSNFLSKPVDVSKFGVIFAGAQKNVGSAGVTVVIVRDDLLGFALRECPSVLEYKVQAGNSSLYNTPPCFSIYVMGLVLEWIKNNGGAAAMEKLSSIKSQTIYEIIGNSQGFYVCPVEPQNRSKMNIPFRIGNAKGDDALEKRFLDKALELNMLSLKGHRSVGGIRASLYNAVTIEDVQKLAAFMKKFLEMHQL

SEQ ID NO: 535 - protein, 370 aa, synthetic construct
MDAPRQVVNFGPGPAKLPHSVLLEIQKELLDYKGVGISVLEMSHRSSDFAKIINNTENLVRELLAVPDNYKVIFLQGGGCGQFSAVPLNLIGLKAGRCADYVVTGAWSAKAAEEAKKFGTINIVHPKLGSYTKIPDPSTWNLNPDASYVYYCANETVHGVEFDFIPDVKGAVLVCDMSSNFLSKPVDVSKFGVIFAGAQKNVGSAGVTVVIVRDDLLGFALRECPSVLEYKVQAGNSSLYNTPPCFSIYVMGLVLEWIKNNGGAAAMEKLSSIKSQTIYEIIDNSQGFYVCPVEPQNRSKMNIPFRIGNAKGDDAVEKRFLDKALELNMLSLKGHRSVGGIRASLYNAVTIEDVQKLAAFMKKFLEMHQL

SEQ ID NO: 536 - protein, 370 aa, synthetic construct
MDALRQVVNFGPGPAKLPHSVLLEIQKELLDYKGVGISVLEMSHRSSDFAKIINNTENLVRELLAVPDNYKVIFLQGGGCGQFSAVPLNLIGLKAGRCADYVVTGAWSAKAAEEAKKFGTINIVHPKLGSYTKIPDPSTWNLNPDASYVYYCANETVHGVEFDFIPDVKGAVLVCDMSSNFLSKPVDVSKFGVIFAGAQKNVGSAGVTVVIVRDDLLGFALRECPSVLEYKVQAGNSSLYNTPPCFSIYVMGLVLEWIKNNGGAAAMEKLSSIKSQTIYEIIDNSQGFYVCPVEPQNRSKMNIPFRIGNAKGDDALEKRFLDKALELNMLSLKGHRSVGGIRASLYNAVTIEDVQKLAAFMKKFLEMHQL

SEQ ID NO: 537 - protein, 370 aa, synthetic construct
MDAPRQVVNFGPGPAKLPHSVLLEIQKELLDYKGVGISVLEMSHRSSDFAKIINNTENLVRELLAVPDNYKVIFLQGGGCGQFSAVPLNLIGLKAGRCAAYVVTGAWSAKAAEEAKKFGTINIVHPKLGSYTKIPDPSTWNLNPDASYVYYCANETVHGVEFDFIPDVKGAVLVCDMSSNFLSKPVDVSKFGVIFAGAQKNVGSAGVTVVIVRDDLLGFALRECPSVLEYKVQAGNSSLYNTPPCFSIYVMGLVLEWIKNNGGAAAMEKLSSIKSQTIYEIIDNSQGFYVCPVEPQNRSKMNIPFRIGNAKGDDALEKRFLDKALELNMLSLKGHRSVGGIRASLYNAVTIEDVQKLAAFMKKFLEMHQL

SEQ ID NO: 538 - protein, 370 aa, synthetic construct
MDAPRQVVNFGPGPAKLPHSVLLEIQKELLDYKGVGISVLEMSHRSSDFAKIINNTENLVRELLAVPDNYKVIFLQGGGCGQFSAVPLNLIGLKAGRCADYVVTGAWSAKAAEEAKKFGTINIVHPKLGSYTKIPDPSTWNLNPDASYVYYCANETVHGVEFDFIPDVKGAVLVCDMSSNFLSKPVDVSNFGVIFAGAQKNVGSAGVTVVIVRDDLLGFALRECPSVLEYKVQAGNSSLYNTPPCFSIYVMGLVLEWIKNNGGAAAMEKLSSIKSQTIYEIIDNSQGFYVCPVEPQNRSKMNIPFRIGNAKGDDALEKRFLDKALELNMLSLKGHRSVGGIRASLYNAVTIEDVQKLAAFMKKFLEMHQL

SEQ ID NO: 539 - protein, 370 aa, synthetic construct
MDAPRQVVNFGPGPVKLPHSVLLEIQKELLDYKGVGISVLEMSHRSSDFAKIINNTENLVRELLAVPDNYKVIFLQGGGCGQFSAVPLNLIGLKAGRCADYVVTGAWSAKAAEEAKKFGTINIVHPKLGSYTKIPDPSTWNLNPDASYVYYCANETVHGVEFDFIPDVKGAVLVCDMSSNFLSKPVDVSKFGVIFAGAQKNVGSAGVTVVIVRDDLLGFALRECPSVLEYKVQAGNSSLYNTPPCFSIYVMGLVLEWIKNNGGAAAMEKLSSIKSQTIYEIIDNSQGFYVCPVEPQNRSKMNIPFRIGNAKGDDALEKRFLDKALELNMLSLKGHRSVGGIRASLYNAVTIEDVQKLAAFMKKFLEMHQL

SEQ ID NO: 540 - protein, 370 aa, synthetic construct
MDAPRQVVNFGPGPAKLPHSVLLEIQKELLDYKGVGISVLEMSHRSSDFAKIINNTENLVRELLAVPDNYKVIFLQGGGCGQFSAVPLNLIGLKAGRCADYVVTGAWSAKAAEEAKKFGTINIVHPKLGSYTKIPDPSTWNLNPDASYVYYCANETVHGVEFDFIPDVKGAVLVCDMSSNFLSKPVDVSKFGVIFAGAQKNVGSAGVTVVIVRDDLLGFALRECPSVLEYKVQAGNSSLYNTPPCFSIYVMGLVLEWIKNNGGAAAMEKLSSIKSQTIYEIIDNSQGFYVCPVEPQNRSKMNIPFRIGNAKGDDALEKRFLDKALELNMLSLKGHRSVGGIRASLYNAVTIEDVQRLAAFMKKFLEMHQL

SEQ ID NO: 541 - protein, 370 aa, synthetic construct
MDAPRQVVNFGPGPAKLPHSVLLEIQKELLDYKGVGISVLEMSHRSSDFAKIINNTENLVRELLAVPDNYKVIFLQGGGCGQFSAVPLNLIGLKAGRCADYVVTGAWSAKAAEEAKKFGTINIVHPKLGSYTKIPDPSTWNLNPDASYVYYCANETVHGVEFDFIPDVKGAVLVCDMSSNFLSKPVDVSKFGVIFAGAQKNVGSAGVTVVIVRDDLLGFDLRECPSVLEYKVQAGNSSLYNTPPCFSIYVMGLVLEWIKNNGGAAAMEKLSSIKSQTIYEIIDNSQGFYVCPVEPQNRSKMNIPFRIGNAKGDDALEKRFLDKALELNMLSLKGHRSVGGIRASLYNAVTIEDVQKLAAFMKKFLEMHQL

SEQ ID NO: 542 - protein, 370 aa, synthetic construct
MDAPRQVVNFGPGPAKLPHSVLLEIQKELLDYKGVGISVLEMSHRSSDFAKIINNTENLVRELLAVPDNYKVIFLQGGGCGQFSAVPLNLIGLKAGRCADYVVTGAWSAKAAEEAKKFGTINIVHPKLGSYTKIPDPSTWNLNPDASYVYYCANETVHGVEFDFIPDVKGAVLVCDMSSNFLSKPVDVSKFGVIFAGAQKNVGSAGVTVVIVRDDLLGFALRECPSVLEYKVQAGNSSLYNTPPCFSIYVMGLVLEWIKNNGGAAAMEKLSSIKSQTIYKIIDNSQGFYVCPVEPQNRSKMNIPFRIGNAKGDDALEKRFLDKALELNMLSLKGHRSVGGIRASLYNAVTIEDVQKLAAFMKKFLEMHQL

SEQ ID NO: 543 - protein, 370 aa, synthetic construct
MDAPRQVVNFGPGPAKLPHSVLLEIQKELLDYKGVGISVLEMSHRSSDFAKIINNTENLVRELLAVPDNYKVIFLQGGGCGQFSAVPLNLIGLKAGRCADYVVTGAWTAKAAEEAKKFGTINIVHPKLGSYTKIPDPSTWNLNPDASYVYYCANETVHGVEFDFIPDVKGAVLVCDMSSNFLSKPVDVSKFGVIFAGAQKNVGSAGVTVVIVRDDLLGFALRECPSVLEYKVQAGNSSLYNTPPCFSIYVMGLVLEWIKNNGGAAAMEKLSSIKSQTIYEIIDNSQGFYVCPVEPQNRSKMNIPFRIGNAKGDDALEKRFLDKALELNMLSLKGHRSVGGIRASLYNAVTIEDVQKLAAFMKKFLEMHQL

SEQ ID NO: 544 - protein, 370 aa, synthetic construct
MDAPRQVVNFGPGPAKLPHSVLLEIQKELLDDKGVGISVLEMSHRSSDFAKIINNTENLVRELLAVPDNYKVIFLQGGGCGQFSAVPLNLIGLKAGRCADYVVTGAWSAKAAEEAKKFGTINIVHPKLGSYTKIPDPSTWNLNPDASYVYYCANETVHGVEFDFIPDVKGAVLVCDMSSNFLSKPVDVSKFGVIFAGAQKNVGSAGVTVVIVRDDLLGFALRECPSVLEYKVQAGNSSLYNTPPCFSIYVMGLVLEWIKNNGGAAAMEKLSSIKSQTIYEIIDNSQGFYVCPVEPQNRSKMNIPFRIGNAKGDDALEKRFLDKALELNMLSLKGHRSVGGIRASLYNAVTIEDVQKLAAFMKKFLEMHQL

SEQ ID NO: 545 - protein, 370 aa, synthetic construct
MDAPRQVVNFGPGPAKLPHSVLLEIQKELLDYKGVGISVLEMSHRSSDFAKIINNTENLVRELLAVPDNYKVIFLQGGGCGQFSAVPLNLIGLKAGRCADYVVTGAWSAKAAEEAKKFGTINIVHPKLGSYTKIPDPSTWNLNPDASYVYYCANETVHGVEFDFIPDVKGAVLVCDMSSNFLSKPVDVSKFGVIFAGAQKNVGSAGVTVVIVRDDLLGFALRECPSVLEYKVQAGNSSLYNTPPCFSIYVMGLVLEWIKNNGRAAAMEKLSSIKSQTIYEIIDNSQGFYVCPVEPQNRSKMNIPFRIGNAKGDDALEKRFLDKALELNMLSLKGHRSVGGIRASLYNAVTIEDVQKLAAFMKKFLEMHQL

SEQ ID NO: 546 - protein, 370 aa, synthetic construct
MDAPRQVVNFGPGPAKLPHSVLLEIQKELLDYKGVGISVLEMSHRSSDFAKIINNTENLVRELLAVPDNYKVIFLQGGGCGQFSAVPLNLIGLKAGRCADYVVTGAWSAKAAEEAKKFGTINIVHPKLGSYTKIPDPSTWNLNPDASYVYYCANETVHGVEFDFIPDVKGAVLVCDMSSNFLSKPVDVSKFGVIFAGAQKNVGSAGVTVVIVRDDLLGFALRECPSVLEYKVQAGNSSLYNTPPCFSIYVMGLVLEWIKNNGGAAAMEKLSSIKSQTIYEIIDNSQGFYVCPVEPQNRSKMNIPFRIGNAKGDDALEKRFLDKALELNMLSLKGHRSVGGIRASLYNAVTIEDGQKLAAFMKKFLEMHQL

SEQ ID NO: 547 - protein, 370 aa, synthetic construct
MDAPRQVVNFGPGPAKLPHSVLLEIQKELLDYKGVGISVLEMSHRSSDFAKIINNTENLVRELLAVPDNYKVIFLQGGGCGQFTAVPLNLIGLKAGRCADYVVTGAWSAKAAEEAKKFGTINIVHPKLGSYTKIPDPSTWNLNPDASYVYYCANETVHGVEFDFIPDVKGAVLVCDMSSNFLSKPVDVSKFGVIFAGAQKNVGSAGVTVVIVRDDLLGFALRECPSVLEYKVQAGNSSLYNTPPCFSIYVMGLVLEWIKNNGGAAAMEKLSSIKSQTIYEIIDNSQGFYVCPVEPQNRSKMNIPFRIGNAKGDDALEKRFLDKALELNMLSLKGHRSVGGIRASLYNAVTIEDVQKLAAFMKKFLEMHQL

SEQ ID NO: 548 - protein, 370 aa, synthetic construct
MDAPRQVVNFGPGPAKLPHSVLLEIQKELLDYKGVGISVLEMSHRSSDFAKIINNTENLVRELLAVPDNYKVIFLQGGGCGQFSAVPLNLIGLKAGRCADYVVTGAWSAKAAEEAKKFGTINIVHPKLGSYTKIPDPSTWNLNPDASYVYYCANETVHGVEFDFIPDVKGAVLVCDMSSNFLSKPVDVSKFGVIFAGAQKNVGSAGVTVVIVRDDLLGFALRECPSVLEYKVQAGNSSLYNTPPCFSIYVMGLVLEWIKNNGGAAAMEKLSSIKSQTIYEIIDNSQGFYVCPVEPQNRSKMNIPFRIGNAKGDDALEKRFLDKALELNMLSLKGHRSVGGIRASLYNAVTIEDVQKLAAFLKKFLEMHQL

SEQ ID NO: 549 - protein, 370 aa, synthetic construct
MDAPRQVVNFGPGPAKLPHSVLLEIQKELLDYKGVGISVLEMSHRSSDFAKIINNTENLVRELLAVPDNYKVIFLQGGGCGQFSAVPLNLIGLKAGRCADYVVTGAWSAKAAEEAKKFGTINIVHPKLGSYTKIPDPSTWNLNPDASYVYYCANETVHGVEFDFIPDVKGAVLVCDMSSNFLSKPVDVSKFGVIFAGAQKNVGSAGVTVVIVRDDLLGFALRECPSVLEYKVQAGNSSLYNTPPCFSIYVMGLVLEWIKNNGGAAAMEKLSSIKSQTIYEIIDNSQGFYVCPVEPQNRSKMNIPFRFGNAKGDDALEKRFLDKALELNMLSLKGHRSVGGIRASLYNAVTIEDVQKLAAFMKKFLEMHQL

SEQ ID NO: 550 - protein, 370 aa, synthetic construct
MDAPRQVVNFGPGPAKLPHSVLLEIQKELLDYKGVGISVLEMSHRSSDFAKIINNTENLVRELLAVPDNYKVIFLQGGGCGQFSAVPLNLIGLKAGRCADYVVTGAWSAKAAEEAKKFGTINIVHPKLGSYTKIPDPSTWNLNPDASYVYYCANETVHGVEFDFIPDVKGAVLVCDMSSNFLSKPVDVSKFGVIFAGAQKNVGSAGVTVVIVRDDLLGFALRECPSVLEYKVQAGNSSLYNTPPCFSIYFMGLVLEWIKNNGGAAAMEKLSSIKSQTIYEIIDNSQGFYVCPVEPQNRSKMNIPFRIGNAKGDDALEKRFLDKALELNMLSLKGHRSVGGIRASLYNAVTIEDVQKLAAFMKKFLEMHQL

SEQ ID NO: 551 - protein, 370 aa, synthetic construct
MDAPRQVVNFGPGPAKLPHSVLLEIQKELLDYKGVGISVLEMSHRSSDFAKIINNTENLVRELLAVPDNYKVIFLQGGGCGQFSAVPLNLIGLKAGRCADYVVTGAWSAKAAEEAKKFGTINIVHPKLGSYTKIPDPSTWNLNPDASYVYYCANETVHGVEFDFIPDVKGAVLVCDMSSNFLSKPVDVSKFGVIFAGAQKNVGSAGVTVVIVRDDLLGFALRECHSVLEYKVQAGNSSLYNTPPCFSIYVMGLVLEWIKNNGGAAAMEKLSSIKSQTIYEIIDNSQGFYVCPVEPQNRSKMNIPFRIGNAKGDDALEKRFLDKALELNMLSLKGHRSVGGIRASLYNAVTIEDVQKLAAFMKKFLEMHQL

SEQ ID NO: 552 - protein, 370 aa, synthetic construct
MDAPRQVVNFGPGPAKLPHSVLLEIQKELLDYKGVGISVLEMSHRSSDFAKIINNTENLVRELLAVPDNYKVISLQGGGCGQFSAVPLNLIGLKAGRCADYVVTGAWSAKAAEEAKKFGTINIVHPKLGSYTKIPDPSTWNLNPDASYVYYCANETVHGVEFDFIPDVKGAVLVCDMSSNFLSKPVDVSKFGVIFAGAQKNVGSAGVTVVIVRDDLLGFALRECPSVLEYKVQAGNSSLYNTPPCFSIYVMGLVLEWIKNNGGAAAMEKLSSIKSQTIYEIIDNSQGFYVCPVEPQNRSKMNIPFRIGNAKGDDALEKRFLDKALELNMLSLKGHRSVGGIRASLYNAVTIEDVQKLAAFMKKFLEMHQL

SEQ ID NO: 553 - protein, 370 aa, synthetic construct
MDAPRQVVNFGPGPAKLPHSVLLEIQKELLDYKGVGISVLEMSHRSSDFAKIINNTENLVRELLAVPDNYKVIFLQGGGCGQFSAVPLNLIGLKAGRCADYVVTGAWSAKAAEEAKKFGTINIVHPKLGSYTKIPDPSTWNLNPDASYVYYCANETVHGVEFDFIPDVKGAVLVCDMSSNFLSKPVDVSKFGVIFAGAQKNVGSAGVTVVIVRDDLLGFALRECPSVLEYKVQAGNSSLYNTPPCFSIYVMGLVLEWIKNNGGAAAMVKLSSIKSQTIYEIIDNSQGFYVCPVEPQNRSKMNIPFRIGNAKGDDALEKRFLDKALELNMLSLKGHRSVGGIRASLYNAVTIEDVQKLAAFMKKFLEMHQL

SEQ ID NO: 554 - protein, 370 aa, synthetic construct
MDAPRQVVNFGPGPAKLPHSVLLEIQKELLDYKGVGISVLEMSHRSSDFAKIINNTENLVRELLAVPDNYKVIFLQGGGCGQFSAVPLNLIGLKAGRCADYVVTGAWSAKAAEAAKKFGTINIVHPKLGSYTKIPDPSTWNLNPDASYVYYCANETVHGVEFDFIPDVKGAVLVCDMSSNFLSKPVDVSKFGVIFAGAQKNVGSAGVTVVIVRDDLLGFALRECPSVLEYKVQAGNSSLYNTPPCFSIYVMGLVLEWIKNNGGAAAMEKLSSIKSQTIYEIIDNSQGFYVCPVEPQNRSKMNIPFRIGNAKGDDALEKRFLDKALELNMLSLKGHRSVGGIRASLYNAVTIEDVQKLAAFMKKFLEMHQL

SEQ ID NO: 555 - protein, 370 aa, synthetic construct
MDAPRQVVNFGPGPAKLPHSVLLEIQKELLDYKGVGISVLEMSHRSSDFAKIINNTENLVRELLAVPDNYKVIFLQGGGCGQFSAVPLNLIGLKAGRCADYVVTGAWSAKAAEEAKKFGTINIVHPKLGSYTKIPDPSTWNLNPDASYVYYCANETVHGVEFDFIPDVKGAVLVCDMSSNFLSKPVDVSKFGVIFAGAQKNVGSAGVTVVIVRDDLLGFALRECPSVLEYKVQAGNSSLYNTPPCFSIYVMGLVLEWIKNNGGAAAMEKLSSIKSQTIYEIIDNSQGFYVCPVEPQNRSKMNIPFRIGNAKGDDALEKRFLDKALELNMLSLKGHRSVGGIRASLYNAVTIEDVQKLAAFMKKFLAMHQL

SEQ ID NO: 556 - protein, 370 aa, synthetic construct
MDAPRQVVNFGPGPAKLPHSVLLEIQKELLDYKGVGISVLEMSHRSSDFAKIINNTENLVRELLAVPDNYKVIFLQGGGCGQFSAVPLNLIGLKAGRCADYVVTGAWSAKAAEEAKKFGTINIVHPKLGSYTKIPDPSTWNLNPDASYVYYCANETVHGVEFDFIPDVKGAVLVCDMSSNFLSKPVDVSKFGVIFAGAQKNVGSAGVTVVIVRDDLLGFALRECPSVLEYKVQAGNSSLYNTPPCFSIYVMGLVLEWIKNNGGAAAMEKLSSIKSQTIYEIIDNSQGFYVCPVEPQNRTKMNIPFRIGNAKGDDALEKRFLDKALELNMLSLKGHRSVGGIRASLYNAVTIEDVQKLAAFMKKFLEMHQL

SEQ ID NO: 557 - protein, 370 aa, synthetic construct
MDAPRQVVNFGPGPAKLPHSVLLEIQKELLDYKGVGISVLEMSHRSSDFAKIINNTENLVRELLAVPDNYKVIFLQGGGCGQFSAVPLNLIGLKAGRCADYVVTGAWSAKAAEEAKKFGTINIVHPKLGSYTKIPDPSTWNLNPDASYVYYCANETVHGVEFDFIPDVKGAVLVCDMSSNFLSKPVDVSKFGVIFAGAQKNVGSAGVTVVIVRDDLLGFALRECPSVLEYKVQAGNSSLYNTPPCFSIYVMGLVLEWIKNNGGAAAMEKLSSIKSQTIYEIIDISQGFYVCPVEPQNRSKMNIPFRIGNAKGDDALEKRFLDKALELNMLSLKGHRSVGGIRASLYNAVTIEDVQKLAAFMKKFLEMHQL

SEQ ID NO: 558 - protein, 370 aa, synthetic construct
MDAPRQVVNFGPGPAKLPHSVLLEIQKELLDYKGVGISVLEMSHRSSDFAKIINNTENLVRELLAVPDNYKVIFLQGGGCGQFSAVPLNLIGLKAGRCADYVVTGAWSAKAAEEAKKFGTINIVHPKLGSYTKIPDPSTWNLNPDASYVYYCANETVHGVEFDFIPDVKGAVLVCDMSSNFLSKPVDVSKFGVIFAGAQKNVGSAGVTVVIVRDDLLGFALRECPSVLEYKVQPGNSSLYNTPPCFSIYVMGLVLEWIKNNGGAAAMEKLSSIKSQTIYEIIDNSQGFYVCPVEPQNRSKMNIPFRIGNAKGDDALEKRFLDKALELNMLSLKGHRSVGGIRASLYNAVTIEDVQKLAAFMKKFLEMHQL

SEQ ID NO: 559 - protein, 370 aa, synthetic construct
MDAPRQVVNFGPGPAKLPHSVLLEIQKELLDYKGVGISVLEMSHRSSDFAKIINNTENLVRELLAVPDNYKVIFLQGGGCGQFSAVPLNLIGLKAGRCADHVVTGAWSAKAAEEAKKFGTINIVHPKLGSYTKIPDPSTWNLNPDASYVYYCANETVHGVEFDFIPDVKGAVLVCDMSSNFLSKPVDVSKFGVIFAGAQKNVGSAGVTVVIVRDDLLGFALRECPSVLEYKVQAGNSSLYNTPPCFSIYVMGLVLEWIKNNGGAAAMEKLSSIKSQTIYEIIDNSQGFYVCPVEPQNRSKMNIPFRIGNAKGDDALEKRFLDKALELNMLSLKGHRSVGGIRASLYNAVTIEDVQKLAAFMKKFLEMHQL

SEQ ID NO: 560 - protein, 370 aa, synthetic construct
MDAPRQVVNFGPGPAKLPHSVLLEIQKELLDYKGVGISVLEMSHRSSDFAKIINNTENLVRELLAVPDNYKVIFLQGGGCGQFSAVPLNLIGLKAGRCADYVVTGAWSAKAAEEAKKFGTINIVHPKLGSYTKIPDPSTWNLNPDASYVYYCANETVHGVEFDFIPDVKGAVLVCDMSSNFLSKPVDVSKFGVIFAGAQKNVGSAGVTVVIVRDDLLGFALRECPSVLEYKVQAGNSSLYNTPPCFSIYVMGLVLEWIKNNGGAAAMEKLSSIKSQTIYEIIDNSQGFYVCPVEPQNRSKMNIPFRIGNAKGDDALEKRFLDKALELNMLSLKGHRSVGGIRASLYNAVTIEGVQKLAAFMKKFLEMHQL

SEQ ID NO: 561 - protein, 370 aa, synthetic construct
MDAPRQVVNFGPGPAKLPHSVLLEIQKELLDYKGVGISVLEMSHRSSDFAKIINNTENLVRELLAVPDNYKVIFLQGGGCGQFSAVPLNLIGLKAGRCADYVVTGAWSAKAAEEAKKFGTINIVHPKLGSYTKIPDPSTWNLNPDASYVYYCANETVHGVEFDFIPDDKGAVLVCDMSSNFLSKPVDVSKFGVIFAGAQKNVGSAGVTVVIVRDDLLGFALRECPSVLEYKVQAGNSSLYNTPPCFSIYVMGLVLEWIKNNGGAAAMEKLSSIKSQTIYEIIDNSQGFYVCPVEPQNRSKMNIPFRIGNAKGDDALEKRFLDKALELNMLSLKGHRSVGGIRASLYNAVTIEDVQKLAAFMKKFLEMHQL

SEQ ID NO: 562 - protein, 370 aa, synthetic construct
MDAPRQVVNFGPGPAKLPHSVLLEIQKELLDYKGVGISVLEMSHRSSDFAKIINNTENLVRELLAVPDNYKVIFLQGGGCGQFSAVPLNLIGLKAGRCADYVVTGAWSAKAAEEAKKFGTINIVHPKLGSYTKIPDPSTWNLNPDASYVYYCANETVHGVEFDFIPDVKGAVLVCDMSSNFLSKPVDVSKFGVIFAGAQKNVGSAGVTVVIVRDDLLWFALRECPSVLEYKVQAGNSSLYNTPPCFSIYVMGLVLEWIKNNGGAAAMEKLSSIKSQTIYEIIDNSQGFYVCPVEPQNRSKMNIPFRIGNAKGDDALEKRFLDKALELNMLSLKGHRSVGGIRASLYNAVTIEDVQKLAAFMKKFLEMHQL

SEQ ID NO: 563 - protein, 370 aa, synthetic construct
MDAPRQVVNFGPGPAKLPHSVLLEIQKELLDYKGVGISVLEMSHRSSDFAKIINNTENLVRELLAVTDNYKVIFLQGGGCGQFSAVPLNLIGLKAGRCADYVVTGAWSAKAAEEAKKFGTINIVHPKLGSYTKIPDPSTWNLNPDASYVYYCANETVHGVEFDFIPDVKGAVLVCDMSSNFLSKPVDVSKFGVIFAGAQKNVGSAGVTVVIVRDDLLGFALRECPSVLEYKVQAGNSSLYNTPPCFSIYVMGLVLEWIKNNGGAAAMEKLSSIKSQTIYEIIDNSQGFYVCPVEPQNRSKMNIPFRIGNAKGDDALEKRFLDKALELNMLSLKGHRSVGGIRASLYNAVTIEDVQKLAAFMKKFLEMHQL

SEQ ID NO: 564 - protein, 370 aa, synthetic construct
MDAPRQVVNFGPGPAKLPHSVLLEIQKELLDYKGVGISVLEMSHRSSDFAKIINNTENLVRELLAVPDNYKVIFLQGGGCGQFSAVPLNLIGLKAGRCADYVVTGPWSAKAAEEAKKFGTINIVHPKLGSYTKIPDPSTWNLNPDASYVYYCANETVHGVEFDFIPDVKGAVLVCDMSSNFLSKPVDVSKFGVIFAGAQKNVGSAGVTVVIVRDDLLGFALRECPSVLEYKVQAGNSSLYNTPPCFSIYVMGLVLEWIKNNGGAAAMEKLSSIKSQTIYEIIDNSQGFYVCPVEPQNRSKMNIPFRIGNAKGDDALEKRFLDKALELNMLSLKGHRSVGGIRASLYNAVTIEDVQKLAAFMKKFLEMHQL

SEQ ID NO: 565 - protein, 370 aa, synthetic construct
MDAPRQVVNFGPGPAKLPHSVLLEIQKELLDYKGVGISVLEMSHRSSDFAKIINNTENLVRELLAVPDNYKVIFLQGGGCGQFSAVPLNLIGLKAGRCADYVVTGAWSAKAAEEAKKFGTINIVHPKLGSYTKIPDPSTWNLNPDASYVYYGANETVHGVEFDFIPDVKGAVLVCDMSSNFLSKPVDVSKFGVIFAGAQKNVGSAGVTVVIVRDDLLGFALRECPSVLEYKVQAGNSSLYNTPPCFSIYVMGLVLEWIKNNGGAAAMEKLSSIKSQTIYEIIDNSQGFYVCPVEPQNRSKMNIPFRIGNAKGDDALEKRFLDKALELNMLSLKGHRSVGGIRASLYNAVTIEDVQKLAAFMKKFLEMHQL

SEQ ID NO: 566 - protein, 370 aa, synthetic construct
MDAPRQVVNFGPGPAKLQHSVLLEIQKELLDYKGVGISVLEMSHRSSDFAKIINNTENLVRELLAVPDNYKVIFLQGGGCGQFSAVPLNLIGLKAGRCADYVVTGAWSAKAAEEAKKFGTINIVHPKLGSYTKIPDPSTWNLNPDASYVYYCANETVHGVEFDFIPDVKGAVLVCDMSSNFLSKPVDVSKFGVIFAGAQKNVGSAGVTVVIVRDDLLGFALRECPSVLEYKVQAGNSSLYNTPPCFSIYVMGLVLEWIKNNGGAAAMEKLSSIKSQTIYEIIDNSQGFYVCPVEPQNRSKMNIPFRIGNAKGDDALEKRFLDKALELNMLSLKGHRSVGGIRASLYNAVTIEDVQKLAAFMKKFLEMHQL

SEQ ID NO: 567 - protein, 370 aa, synthetic construct
MDAPRQVVNFGPGPAKLPHSVLLEIQKELLDYKGVGISVLEMSHRSSDFAKIINNTENLVRELLAVPDNYKVIFLQGGGCGQFSAVPLNLIGLKAGRCADYVVTGAWSAKAAEEAKKFGTINIVHPKLGSYTKIPDPSTWNLNPDASYVYYCANETVHGVEFDFIPDVKGAVLVCDMSSNFLSKPVDVSKFGVSFAGAQKNVGSAGVTVVIVRDDLLGFALRECPSVLEYKVQAGNSSLYNTPPCFSIYVMGLVLEWIKNNGGAAAMEKLSSIKSQTIYEIIDNSQGFYVCPVEPQNRSKMNIPFRIGNAKGDDALEKRFLDKALELNMLSLKGHRSVGGIRASLYNAVTIEDVQKLAAFMKKFLEMHQL

SEQ ID NO: 568 - protein, 370 aa, synthetic construct
MDAPRQVVNFGPGPAKLPHSVLLEIQKELLDYKGVGISVLEMSHRSSDFAKIINNTENLVRELLAVPDNYKVIFLQGGGCGQFSAVPLNLIGLKAGRFADYVVTGAWSAKAAEEAKKFGTINIVHPKLGSYTKIPDPSTWNLNPDASYVYYCANETVHGVEFDFIPDVKGAVLVCDMSSNFLSKPVDVSKFGVIFAGAQKNVGSAGVTVVIVRDDLLGFALRECPSVLEYKVQAGNSSLYNTPPCFSIYVMGLVLEWIKNNGGAAAMEKLSSIKSQTIYEIIDNSQGFYVCPVEPQNRSKMNIPFRIGNAKGDDALEKRFLDKALELNMLSLKGHRSVGGIRASLYNAVTIEDVQKLAAFMKKFLEMHQL

SEQ ID NO: 569 - protein, 370 aa, synthetic construct
MDAPRQVVNFGPGPAKLPHSVLLEIQKELLDYKGVGISVLEMSHRSSDFAKIINNTENLVRELLAVPYNYKVIFLQGGGCGQFSAVPLNLIGLKAGRCADYVVTGAWSAKAAEEAKKFGTINIVHPKLGSYTKIPDPSTWNLNPDASYVYYCANETVHGVEFDFIPDVKGAVLVCDMSSNFLSKPVDVSKFGVIFAGAQKNVGSAGVTVVIVRDDLLGFALRECPSVLEYKVQAGNSSLYNTPPCFSIYVMGLVLEWIKNNGGAAAMEKLSSIKSQTIYEIIDNSQGFYVCPVEPQNRSKMNIPFRIGNAKGDDALEKRFLDKALELNMLSLKGHRSVGGIRASLYNAVTIEDVQKLAAFMKKFLEMHQL

SEQ ID NO: 570 - protein, 370 aa, synthetic construct
MDAPRQVVNFGPGPAKLPHSVLLEIQKELLDYKGVGISVLEMSHRSSDFAKIINNTENLVRELLAVPDNYKVIFLQGGGCGQFSAVPLNLIGLKAGRCSDYVVTGAWSAKAAEEAKKFGTINIVHPKLGSYTKIPDPSTWNLNPDASYVYYCANETVHGVEFDFIPDVKGAVLVCDMSSNFLSKPVDVSKFGVIFAGAQKNVGSAGVTVVIVRDDLLGFALRECPSVLEYKVQAGNSSLYNTPPCFSIYVMGLVLEWIKNNGGAAAMEKLSSIKSQTIYEIIDNSQGFYVCPVEPQNRSKMNIPFRIGNAKGDDALEKRFLDKALELNMLSLKGHRSVGGIRASLYNAVTIEDVQKLAAFMKKFLEMHQL

SEQ ID NO: 571 - protein, 370 aa, synthetic construct
MDAPRQVVNFGPGPAKLPHSVLLEIQKELLDYKGVGISVLEMSHRSSDFAKIINNTENLVRELLAVPDNYKVIFLQGGGCGQFSAVPLNFIGLKAGRCADYVVTGAWSAKAAEEAKKFGTINIVHPKLGSYTKIPDPSTWNLNPDASYVYYCANETVHGVEFDFIPDVKGAVLVCDMSSNFLSKPVDVSKFGVIFAGAQKNVGSAGVTVVIVRDDLLGFALRECPSVLEYKVQAGNSSLYNTPPCFSIYVMGLVLEWIKNNGGAAAMEKLSSIKSQTIYEIIDNSQGFYVCPVEPQNRSKMNIPFRIGNAKGDDALEKRFLDKALELNMLSLKGHRSVGGIRASLYNAVTIEDVQKLAAFMKKFLEMHQL

SEQ ID NO: 572 - protein, 370 aa, synthetic construct
MDAPRQVVNFGPGPAKLPHSVLLEIQKELLDYKGVGISVLEMSHRSSDFAKIINNTENLVRELLAVPDNYKVIFLQGGGCGQFSAVPLNLIGLKAGRCADYVVTGAWSAKAAEEAKKFGTINIVHPKLGSYTKIPDPSTWNLNPDASYVYYCANETVHGVEFDFIPDVKGAVLVCDMSSNFLSKPVDVSKFGVIFAGAQKNAGSAGVTVVIVRDDLLGFALRECPSVLEYKVQAGNSSLYNTPPCFSIYVMGLVLEWIKNNGGAAAMEKLSSIKSQTIYEIIDNSQGFYVCPVEPQNRSKMNIPFRIGNAKGDDALEKRFLDKALELNMLSLKGHRSVGGIRASLYNAVTIEDVQKLAAFMKKFLEMHQL

SEQ ID NO: 573 - protein, 370 aa, synthetic construct
MDAPRQVVNFGPGPAKLPHSVLLEIQKELLDYKGVGISVLEMSHRSSDFAKIIINTENLVRELLAVPDNYKVIFLQGGGCGQFSAVPLNLIGLKAGRCADYVVTGAWSAKAAEEAKKFGTINIVHPKLGSYTKIPDPSTWNLNPDASYVYYCANETVHGVEFDFIPDVKGAVLVCDMSSNFLSKPVDVSKFGVIFAGAQKNVGSAGVTVVIVRDDLLGFALRECPSVLEYKVQAGNSSLYNTPPCFSIYVMGLVLEWIKNNGGAAAMEKLSSIKSQTIYEIIDNSQGFYVCPVEPQNRSKMNIPFRIGNAKGDDALEKRFLDKALELNMLSLKGHRSVGGIRASLYNAVTIEDVQKLAAFMKKFLEMHQL

SEQ ID NO: 574 - protein, 370 aa, synthetic construct
MDAPRQVVNFGPGPAKLPHSVLLEIQKELLDYKGVGISVLEMSHRSSDFAKIINNTENLVRELLAVPDNYKVIFLQGGGCGQFSAVPLNLIGLKAGRCADYVMTGAWSAKAAEEAKKFGTINIVHPKLGSYTKIPDPSTWNLNPDASYVYYCANETVHGVEFDFIPDVKGAVLVCDMSSNFLSKPVDVSKFGVIFAGAQKNVGSAGVTVVIVRDDLLGFALRECPSVLEYKVQAGNSSLYNTPPCFSIYVMGLVLEWIKNNGGAAAMEKLSSIKSQTIYEIIDNSQGFYVCPVEPQNRSKMNIPFRIGNAKGDDALEKRFLDKALELNMLSLKGHRSVGGIRASLYNAVTIEDVQKLAAFMKKFLEMHQL

SEQ ID NO: 575 - protein, 370 aa, synthetic construct
MDAPRQVVNFGPGPAKLPHSVLLEIQKELLDYKGVGISVLEMSHRSSDFAKIINNTENLVRELLAVPDNYKVIFLQGGGCGQFSAVPLNLIGLKAGRCADYVVTGAWSAKAAEEAKKFGTINIVHPKLGSYTKIPDPSTWNLNPDASYVYYCANETVHGVEFDFIPDVKGAVLVCDMSSNFLSKPVDVSKFGVIFAGAQKNVGSAGVTVVIVRDDLLGFALRECPSVLEYKVQAGNSSLYNTPPCFSIYVMGLVLEWIKNNGGAAAMEKLSSIKSQTIYEIIDNSQGFYLCPVEPQNRSKMNIPFRIGNAKGDDALEKRFLDKALELNMLSLKGHRSVGGIRASLYNAVTIEDVQKLAAFMKKFLEMHQL

SEQ ID NO: 576 - protein, 370 aa, synthetic construct
MDAPRQVVNFGPGPAKLPHSVLLEIQKELLDYKGVGISVLEMSHRSSDFAKIINNTENLVRELLAVQDNYKVIFLQGGGCGQFSAVPLNLIGLKAGRCADYVVTGAWSAKAAEEAKKFGTINIVHPKLGSYTKIPDPSTWNLNPDASYVYYCANETVHGVEFDFIPDVKGAVLVCDMSSNFLSKPVDVSKFGVIFAGAQKNVGSAGVTVVIVRDDLLGFALRECPSVLEYKVQAGNSSLYNTPPCFSIYVMGLVLEWIKNNGGAAAMEKLSSIKSQTIYEIIDNSQGFYVCPVEPQNRSKMNIPFRIGNAKGDDALEKRFLDKALELNMLSLKGHRSVGGIRASLYNAVTIEDVQKLAAFMKKFLEMHQL

SEQ ID NO: 577 - protein, 370 aa, synthetic construct
MDAPRQVVNFGPGPAKLPHSVLLEIQKELLDYKGVGISVLEMSHRSSDFAKIINNTENLVRELLAVPDNYKVIFLQGGGCGQFSAVPLNLIGLKAGRCADYVVTGAWSAKAAEEAKKFGTINIVHPKLGSYTKIPDPSTWNLNPDASYVYCCANETVHGVEFDFIPDVKGAVLVCDMSSNFLSKPVDVSKFGVIFAGAQKNVGSAGVTVVIVRDDLLGFALRECPSVLEYKVQAGNSSLYNTPPCFSIYVMGLVLEWIKNNGGAAAMEKLSSIKSQTIYEIIDNSQGFYVCPVEPQNRSKMNIPFRIGNAKGDDALEKRFLDKALELNMLSLKGHRSVGGIRASLYNAVTIEDVQKLAAFMKKFLEMHQL

SEQ ID NO: 578 - protein, 370 aa, synthetic construct
MDAPRQVVNFGPGPAKLPHSVLLEIQKELLDYKGVGISVLEMSHRSSDLAKIINNTENLVRELLAVPDNYKVIFLQGGGCGQFSAVPLNLIGLKAGRCADYVVTGAWSAKAAEEAKKFGTINIVHPKLGSYTKIPDPSTWNLNPDASYVYYCANETVHGVEFDFIPDVKGAVLVCDMSSNFLSKPVDVSKFGVIFAGAQKNVGSAGVTVVIVRDDLLGFALRECPSVLEYKVQAGNSSLYNTPPCFSIYVMGLVLEWIKNNGGAAAMEKLSSIKSQTIYEIIDNSQGFYVCPVEPQNRSKMNIPFRIGNAKGDDALEKRFLDKALELNMLSLKGHRSVGGIRASLYNAVTIEDVQKLAAFMKKFLEMHQL

SEQ ID NO: 579 - protein, 370 aa, synthetic construct
MDAPRQVVNFGPGPAKLPHSVLLEIQKELLDYKGVGISVLEMSHRSSDFAKIINNTEKLVRELLAVPDNYKVIFLQGGGCGQFSAVPLNLIGLKAGRCADYVVTGAWSAKAAEEAKKFGTINIVHPKLGSYTKIPDPSTWNLNPDASYVYYCANETVHGVEFDFIPDVKGAVLVCDMSSNFLSKPVDVSKFGVIFAGAQKNVGSAGVTVVIVRDDLLGFALRECPSVLEYKVQAGNSSLYNTPPCFSIYVMGLVLEWIKNNGGAAAMEKLSSIKSQTIYEIIDNSQGFYVCPVEPQNRSKMNIPFRIGNAKGDDALEKRFLDKALELNMLSLKGHRSVGGIRASLYNAVTIEDVQKLAAFMKKFLEMHQL

SEQ ID NO: 580 - protein, 370 aa, synthetic construct
MDAPRQVVNFGPGPAKLPHSVLLEIQKELLDYKGVGISVLEMSHRSSDFAKIINNTENLVRELLAVPDNYKVIFLQGGGCGQFSAVPLNLIGLKAGRCADYVVTGAWSAKAAEEAKKFGTINIVHPKLGSYTKIPDPSTWNLNPDASYVYYCANETVHGVEFDFIPDVKGAVLVCDMSSNFLSKPVDVSKFGVIFAGAQKNVGSAGVTVVIVRDDLLGFALRECPSVLENKVQAGNSSLYNTPPCFSIYVMGLVLEWIKNNGGAAAMEKLSSIKSQTIYEIIDNSQGFYVCPVEPQNRSKMNIPFRIGNAKGDDALEKRFLDKALELNMLSLKGHRSVGGIRASLYNAVTIEDVQKLAAFMKKFLEMHQL

SEQ ID NO: 581 - protein, 370 aa, synthetic construct
MDAPRQVVNFGPGPAKLPHSVLLEIQKELLDYKGVGISVLEMSHRSSDFAKIINNTENLVRELLAVPDNYKVIFLQGGGCGQFSAVPLNLIGLKAGRCADYVVTGAWSAKAAEEAKKFGTINIVHPKLGSYTKIPDPSTWNLNPDASYVYYCANETVHGVEFDFIPDVKGAVLVCDMSSNFLSKPVDVSKFGVIFAGAQKNVGSAGVTVVIVRDDLLGFALRECPSVLEYKVQAGNSSLYNTPPCFSIYVMGLVLEWIKNNGGAAAMEKLSSIKSQTIYEIIDNSQGFYVCPVEPQNRSKMNIPFRIGNAKGDDALEKRFLDKALEPNMLSLKGHRSVGGIRASLYNAVTIEDVQKLAAFMKKFLEMHQL

SEQ ID NO: 582 - protein, 370 aa, synthetic construct
MDAPRQVVNFGPGPAKLPHSVLLEIQKELLDYKGVGISVLEMSHRSSDFAKIINNTENLVRELLAVPDNYKVIFLQGGGCGQFSAVPLNLIGLKAGRCADYVVTGAWSAKAAEEAKKFGTINIVHPKLGSYTKIPDPSTWNLNPDASYVYYCANETVHGVEFDFIPDVKGAVLVCDMSSNFLSKPVDVSKFGVIFAGAQKNVGSAGVTVVIVRDDLLGFALRECPSVLEYKVQAGNSSLYNTPPCFSIYVMGLVLEWIKNNGGAAAMEKLSSIKSQTIYEIIDNSQGFYVCPVEPQNRSKMNIPFRIGNAKGDDALEKRFLDKALELNMLSLKGHRSGGGIRASLYNAVTIEDVQKLAAFMKKFLEMHQL

SEQ ID NO: 583 - protein, 370 aa, synthetic construct
MDAPRQVVNFGPGPAKLPHSVLLEIQKELLDYKGVGISVLEMSHRSSDFAKIINNTENLVRELLAVPDNYKVIFLQGGGCGQFSAVPLNLIGLKAGRCADYVVTGAWSAKAAEEAKKFGTINIVHPKLGSYTKIPDPSTWNLNPDASYVYYCANETVHGVEFDFIPDVKGAVLVCDMSSNFLSKPVDVSKFGVIFAGAQKNVCSAGVTVVIVRDDLLGFALRECPSVLEYKVQAGNSSLYNTPPCFSIYVMGLVLEWIKNNGGAAAMEKLSSIKSQTIYEIIDNSQGFYVCPVEPQNRSKMNIPFRIGNAKGDDALEKRFLDKALELNMLSLKGHRSVGGIRASLYNAVTIEDVQKLAAFMKKFLEMHQL

SEQ ID NO: 584 - protein, 370 aa, synthetic construct
MDAPRQVVNFGPGPAKLPHSVLLEIQKELLDYKGVGISVLEMSHRSSDFAKIINNTENLVRELLAVPDNYKVIFLQGGGCGQFSAVPLNLIGLKAGRCADYAVTGAWSAKAAEEAKKFGTINIVHPKLGSYTKIPDPSTWNLNPDASYVYYCANETVHGVEFDFIPDVKGAVLVCDMSSNFLSKPVDVSKFGVIFAGAQKNVGSAGVTVVIVRDDLLGFALRECPSVLEYKVQAGNSSLYNTPPCFSIYVMGLVLEWIKNNGGAAAMEKLSSIKSQTIYEIIDNSQGFYVCPVEPQNRSKMNIPFRIGNAKGDDALEKRFLDKALELNMLSLKGHRSVGGIRASLYNAVTIEDVQKLAAFMKKFLEMHQL

SEQ ID NO: 585 - protein, 370 aa, synthetic construct
MDAPRQVVNFGPGPAKLPHSVLLEIQKELLDYKGVGISVLEMSHRSSDFAKIINNTENLVRELLAVPDNYKVIFLQGGGCGQFSAVPLNLIGLKAGRCADYVVTGAWSAKAAEEAKKFGTINIVHPKLGSYTKIPDPSTWNLNPDASYVYYCANETVHGVEFDFIPDVKGAVLVCDMSSNFLSKPVDVSKFGVIFAGAQKNVGSAGVTVVIVRDDLLGFALRECPSVLEYKVQAGNSSLYNAPPCFSIYVMGLVLEWIKNNGGAAAMEKLSSIKSQTIYEIIDNSQGFYVCPVEPQNRSKMNIPFRIGNAKGDDALEKRFLDKALELNMLSLKGHRSVGGIRASLYNAVTIEDVQKLAAFMKKFLEMHQL

SEQ ID NO: 586 - protein, 370 aa, synthetic construct
MDAPRQVVNFGPGPAKLPHSVLLEIQKELLDYKGVGISVLEMSHRSSDFAKIINNTENLVQELLAVPDNYKVIFLQGGGCGQFSAVPLNLIGLKAGRCADYVVTGAWSAKAAEEAKKFGTINIVHPKLGSYTKIPDPSTWNLNPDASYVYYCANETVHGVEFDFIPDVKGAVLVCDMSSNFLSKPVDVSKFGVIFAGAQKNVGSAGVTVVIVRDDLLGFALRECPSVLEYKVQAGNSSLYNTPPCFSIYVMGLVLEWIKNNGGAAAMEKLSSIKSQTIYEIIDNSQGFYVCPVEPQNRSKMNIPFRIGNAKGDDALEKRFLDKALELNMLSLKGHRSVGGIRASLYNAVTIEDVQKLAAFMKKFLEMHQL

SEQ ID NO: 587 - protein, 370 aa, synthetic construct
MDAPRQVVNFGPGPAKLPHSVLLEIQKELLDYKGVGISVLEMSHRSSDVAKIINNTENLVRELLAVPDNYKVIFLQGGGCGQFSAVPLNLIGLKAGRCADYVVTGAWSAKAAEEAKKFGTINIVHPKLGSYTKIPDPSTWNLNPDASYVYYCANETVHGVEFDFIPDVKGAVLVCDMSSNFLSKPVDVSKFGVIFAGAQKNVGSAGVTVVIVRDDLLGFALRECPSVLEYKVQAGNSSLYNTPPCFSIYVMGLVLEWIKNNGGAAAMEKLSSIKSQTIYEIIDNSQGFYVCPVEPQNRSKMNIPFRIGNAKGDDALEKRFLDKALELNMLSLKGHRSVGGIRASLYNAVTIEDVQKLAAFMKKFLEMHQL

SEQ ID NO: 588 - protein, 370 aa, synthetic construct
MDAPRQVVNFGPGPAKLPHSVLLEIQKELLDYKGVGISVLEMSHRSSDFAKIINNTENLVRELLAVPDNYKVIFLQGGGCGQFSAVPLNLIGLKAGRCADYVVTGAWSAKAAEEAKKFGTINIVHPKLGSYTKIPDPSTWNLNPDASYVYYCANETVHGVEFDFIPDVKGAVLVCDMSSNFLSKPVDVSKFGVIFAGAQKNVGSAGVTVVIVRDDLLGFALRECPSVLEYKVQAGNSSLYNTPPCFSIYVMGLVLEWIKNNGGAAAMEKLSSIKSQTIYEIIDNSQGFYVCPVEPQNRSKMNIPFRIGNAKGDDALEKRFLDKALELNMLSLKGHRSVGGIRASLYNAVTIEDAQKLAAFMKKFLEMHQL

SEQ ID NO: 589 - protein, 370 aa, synthetic construct
MDAPRQVVNFGPGPAKLPHSVLLEIQKELLDYKGVGISVLEMSHRSSDFAKIINNTENLVRELLAVPDNYKVIFLQGGGCGQFSAVPLNLIGLKAGRCADYVVTGAWSAKAAEEAKKFGTINIVHPKLGSYTKILDPSTWNLNPDASYVYYCANETVHGVEFDFIPDVKGAVLVCDMSSNFLSKPVDVSKFGVIFAGAQKNVGSAGVTVVIVRDDLLGFALRECPSVLEYKVQAGNSSLYNTPPCFSIYVMGLVLEWIKNNGGAAAMEKLSSIKSQTIYEIIDNSQGFYVCPVEPQNRSKMNIPFRIGNAKGDDALEKRFLDKALELNMLSLKGHRSVGGIRASLYNAVTIEDVQKLAAFMKKFLEMHQL

SEQ ID NO: 590 - protein, 370 aa, synthetic construct
MDAPRQVVNFGPGPAKLPHSVLLEIQKELLDYKGVGISVLEMSHRSSDFAKIINNTENLVRELLAVPDNYKVIFLQGGGCGQFSAVPLNLIGLKAGRCADYVVTGAWSAKAAEEAKKFGTINIVHPKLGSYTKIPDPSTWNLNPDASYVYYCANETVHGVEFDFIPDVKGAVLVCDMSSNFLSKPVDVSTFGVIFAGAQKNVGSAGVTVVIVRDDLLGFALRECPSVLEYKVQAGNSSLYNTPPCFSIYVMGLVLEWIKNNGGAAAMEKLSSIKSQTIYEIIDNSQGFYVCPVEPQNRSKMNIPFRIGNAKGDDALEKRFLDKALELNMLSLKGHRSVGGIRASLYNAVTIEDVQKLAAFMKKFLEMHQL

SEQ ID NO: 591 - protein, 370 aa, synthetic construct
MDAPRQVVNFGPGPAKLPHSVLLEIQKELLDYKGVGISVLEMSHRSSDFAKIINNTENLVRELLAVPDNYKVIFLQGGGCGQFSAVPLNLIGLKAGRCADYVVTGAWSAKAAEEAKKFGTINIVHPKLGSYTKIPDPSTWNLNPDASYVYYCANETVHGVEFDFIPDVKGAVLVCDMSSNFLSKPVDVSKFGVFFAGAQKNVGSAGVTVVIVRDDLLGFALRECPSVLEYKVQAGNSSLYNTPPCFSIYVMGLVLEWIKNNGGAAAMEKLSSIKSQTIYEIIDNSQGFYVCPVEPQNRSKMNIPFRIGNAKGDDALEKRFLDKALELNMLSLKGHRSVGGIRASLYNAVTIEDVQKLAAFMKKFLEMHQL

SEQ ID NO: 592 - protein, 370 aa, synthetic construct
MDAPRQVVNFGPGPAKLPHSVLLEIQKELLDYKGVGISVLEMSHRSSDFAKIINNTENLVRELLAVPDNYKVIFLQGGGCGQFSAVPLNLIGLKAGRCADYVVTGAWSVKAAEEAKKFGTINIVHPKLGSYTKIPDPSTWNLNPDASYVYYCANETVHGVEFDFIPDVKGAVLVCDMSSNFLSKPVDVSKFGVIFAGAQKNVGSAGVTVVIVRDDLLGFALRECPSVLEYKVQAGNSSLYNTPPCFSIYVMGLVLEWIKNNGGAAAMEKLSSIKSQTIYEIIDNSQGFYVCPVEPQNRSKMNIPFRIGNAKGDDALEKRFLDKALELNMLSLKGHRSVGGIRASLYNAVTIEDVQKLAAFMKKFLEMHQL

SEQ ID NO: 593 - protein, 370 aa, synthetic construct
MDAPRQVVNFGPGPAKLPHSVLLEIQKELLDYKGVGISVLEMSHRSSDFAKIINNTENLVRELLAVPDNYKVIFLQGGGCGQFSAVPLNLIGLKAGRCADYVVTGAWSAKAAEEAKKFGTINIVDPKLGSYTKIPDPSTWNLNPDASYVYYCANETVHGVEFDFIPDVKGAVLVCDMSSNFLSKPVDVSKFGVIFAGAQKNVGSAGVTVVIVRDDLLGFALRECPSVLEYKVQAGNSSLYNTPPCFSIYVMGLVLEWIKNNGGAAAMEKLSSIKSQTIYEIIDNSQGFYVCPVEPQNRSKMNIPFRIGNAKGDDALEKRFLDKALELNMLSLKGHRSVGGIRASLYNAVTIEDVQKLAAFMKKFLEMHQL

SEQ ID NO: 594 - protein, 370 aa, synthetic construct
MDAPRQVVNFGPGPAKLPHSVLLEIQKELLDYKGVGISVLEMSHRSSDFAKIINNTENLVRELLAVPDNYKVIFLQGGGCGQFSAVPLNLIGLKAGRCADYVVTGAWSAKAAEEAKKFGTINIVHPKLGSYTKIPDPSTWNLNPDASYVYYCANETVHGVEFAFIPDVKGAVLVCDMSSNFLSKPVDVSKFGVIFAGAQKNVGSAGVTVVIVRDDLLGFALRECPSVLEYKVQAGNSSLYNTPPCFSIYVMGLVLEWIKNNGGAAAMEKLSSIKSQTIYEIIDNSQGFYVCPVEPQNRSKMNIPFRIGNAKGDDALEKRFLDKALELNMLSLKGHRSVGGIRASLYNAVTIEDVQKLAAFMKKFLEMHQL

SEQ ID NO: 595 - protein, 370 aa, synthetic construct
MDAPRQVVNFGPGPAKLPHSVLLEIQKELLDYKGVGISVLEMSHRPSDFAKIINNTENLVRELLAVPDNYKVIFLQGGGCGQFSAVPLNLIGLKAGRCADYVVTGAWSAKAAEEAKKFGTINIVHPKLGSYTKIPDPSTWNLNPDASYVYYCANETVHGVEFDFIPDVKGAVLVCDMSSNFLSKPVDVSKFGVIFAGAQKNVGSAGVTVVIVRDDLLGFALRECPSVLEYKVQAGNSSLYNTPPCFSIYVMGLVLEWIKNNGGAAAMEKLSSIKSQTIYEIIDNSQGFYVCPVEPQNRSKMNIPFRIGNAKGDDALEKRFLDKALELNMLSLKGHRSVGGIRASLYNAVTIEDVQKLAAFMKKFLEMHQL

SEQ ID NO: 596 - protein, 370 aa, synthetic construct
MDAPRQVVNFGPGPAKLPHSVLLEIQKELLDYKGVGISVLEMSHRSSDFAKIINNTENLVRELLAVPDNYKVIFLQGGGCGQFSAVPLNLIGLKAGRCADFVVTGAWSAKAAEEAKKFGTINIVHPKLGSYTKIPDPSTWNLNPDASYVYYCANETVHGVEFDFIPDVKGAVLVCDMSSNFLSKPVDVSKFGVIFAGAQKNVGSAGVTVVIVRDDLLGFALRECPSVLEYKVQAGNSSLYNTPPCFSIYVMGLVLEWIKNNGGAAAMEKLSSIKSQTIYEIIDNSQGFYVCPVEPQNRSKMNIPFRIGNAKGDDALEKRFLDKALELNMLSLKGHRSVGGIRASLYNAVTIEDVQKLAAFMKKFLEMHQL

SEQ ID NO: 597 - protein, 370 aa, synthetic construct
MDAPRQVVNFGPGPAKLPHSVLLEIQKELLDYKGVGISVLEMSHRSSDFAKIINNTENLVRELLAVPDNYKVIFLQGGGCGQFSAVPLNLIGLKAGRCADYVVTGAWSAKAAEEAKKFGTINIVHPKLGSYTKIPDPSTWNLNPDASYVYYCANETVHGVEFDFIPDVKGAVLVCDMSSNFLSKPVDVSKFGVIFAGAQKNVGSAGVTVVIVRDDLLGFALRECPSVLEYKVQAGNSSLYNTPPCFSIYVMGLVLEWIKNNGGAAAMEKLSSIKSQTIYEIIDNSQGFYVCPVEPQNRSKMNIPFRIGNAKGDDALEKRFLDKALELNMLSLKGHRPVGGIRASLYNAVTIEDVQKLAAFMKKFLEMHQL

SEQ ID NO: 598 - protein, 370 aa, synthetic construct
MDAPRQVVNFGPGPAKLPHSVLLEIQKELLDYKGVGISVLEMSHRSSDFAQIINNTENLVRELLAVPDNYKVIFLQGGGCGQFSAVPLNLIGLKAGRCADYVVTGAWSAKAAEEAKKFGTINIVHPKLGSYTKIPDPSTWNLNPDASYVYYCANETVHGVEFDFIPDVKGAVLVCDMSSNFLSKPVDVSKFGVIFAGAQKNVGSAGVTVVIVRDDLLGFALRECPSVLEYKVQAGNSSLYNTPPCFSIYVMGLVLEWIKNNGGAAAMEKLSSIKSQTIYEIIDNSQGFYVCPVEPQNRSKMNIPFRIGNAKGDDALEKRFLDKALELNMLSLKGHRSVGGIRASLYNAVTIEDVQKLAAFMKKFLEMHQL

SEQ ID NO: 599 - protein, 370 aa, synthetic construct
MDAPRQVVNFGPGPAKLPHSVLLEIQKELLDYKGVGISVLEMSHRSSDFAKIINNTENVVRELLAVPDNYKVIFLQGGGCGQFSAVPLNLIGLKAGRCADYVVTGAWSAKAAEEAKKFGTINIVHPKLGSYTKIPDPSTWNLNPDASYVYYCANETVHGVEFDFIPDVKGAVLVCDMSSNFLSKPVDVSKFGVIFAGAQKNVGSAGVTVVIVRDDLLGFALRECPSVLEYKVQAGNSSLYNTPPCFSIYVMGLVLEWIKNNGGAAAMEKLSSIKSQTIYEIIDNSQGFYVCPVEPQNRSKMNIPFRIGNAKGDDALEKRFLDKALELNMLSLKGHRSVGGIRASLYNAVTIEDVQKLAAFMKKFLEMHQL

SEQ ID NO: 600 - protein, 370 aa, synthetic construct
MDAPRQVVNFGPGPAKLPHSVLLEIQKELLDYKGVGISVLEMSHRSSDFAKIINNTENLVRELLAVPDNYKVIFLQGGGCGQFSAVPLNLIGLKAGRCADYVVTGAWSAKAAEEAKKFGTINIVHPKLGSYTKIPDPSTWNLNPDASYVYYCANETVHGVEFDFIPDVKGAVLVCDMSSNFLSKPVDVSKFGVIFAGAQKNVGSAGVTVVIVRDDLLGFALRECPSVLEYKVQAGNSSLYNTPPCFSIYVMGLVLEWIKNNGGAAAMEKLSSIKSQTIYEIIDNSQGFYVCPVEPQTRSKMNIPFRIGNAKGDDALEKRFLDKALELNMLSLKGHRSVGGIRASLYNAVTIEDVQKLAAFMKKFLEMHQL

SEQ ID NO: 601 - protein, 370 aa, synthetic construct
MDAPRQVVNFGPGPAKLPHSVLLEIQKELLDYKGVGISVLEMSHRSSDFAKIINNTENLVRELLAVPDNYKVIFLQGGGCGQFSAVPLNLIGLKAGRCADYVVTGAWSAKAAEEAKKFGTINIAHPKLGSYTKIPDPSTWNLNPDASYVYYCANETVHGVEFDFIPDVKGAVLVCDMSSNFLSKPVDVSKFGVIFAGAQKNVGSAGVTVVIVRDDLLGFALRECPSVLEYKVQAGNSSLYNTPPCFSIYVMGLVLEWIKNNGGAAAMEKLSSIKSQTIYEIIDNSQGFYVCPVEPQNRSKMNIPFRIGNAKGDDALEKRFLDKALELNMLSLKGHRSVGGIRASLYNAVTIEDVQKLAAFMKKFLEMHQL

SEQ ID NO: 602 - protein, 370 aa, synthetic construct
MDAPRQVVNFGPGPAKLPHSVLLEIQKELLDYKGVGISVLEMSHRSSDFAKIINNTENLVRELLAVPDNYKVIFLQGGGCGQFSAVPLNLIGLKAGRCADYVVTGAWSAKAAEEAKKFGTINIVHPKLGSYTKIPDPSTWNLNPDASYVYYCANETVHGVEFDFIPDVKGAVLVCDMSSNFLSKPVDVSKFGVIFAGAQKNVGSAGVTVVIVRDDLLGFALRECPSVLEYKVQAGNSSLYNTPPCFSIYVMGLVLEWIKNNGGAAAMEKLSSIKSQTIYEIIDNSQGFYVCPVEPQNRSKMNIPFRMGNAKGDDALEKRFLDKALELNMLSLKGHRSVGGIRASLYNAVTIEDVQKLAAFMKKFLEMHQL

SEQ ID NO: 603 - protein, 370 aa, synthetic construct
MDAPRQVVNFGPGPAKLPHSVLLEIQKELLDYKGVGISVLEMSHRSSDFAKIINNTENLVRELLAVPDNYKVIFLQGGGCGQFSAVPLNLIGLKAGRCADYVVTGAWSAKAAEEAKKFGTINIVHPKLGSYTKIPDPSTWNLNPDASYVYYCANETVHGVEFDFIPDVKGAVLVCDMSSNFLSKPVDVSKFGVIFAGAQKNVGSAGVTVVIVRDDLLGFALRECPSVLEYKVQAGNSSLYNTPPCFSIYVMGLVLEWIKNNGGAAPMEKLSSIKSQTIYEIIDNSQGFYVCPVEPQNRSKMNIPFRIGNAKGDDALEKRFLDKALELNMLSLKGHRSVGGIRASLYNAVTIEDVQKLAAFMKKFLEMHQL

SEQ ID NO: 604 - protein, 370 aa, synthetic construct
MDAPRQVVNFGPGPAKLPHSVLLEIQKELLDYKGVGISVLEMSHRSSDFAKIINNTENLVRELLAVPDNYKVIFLQGGGCGQFSAVPLNLIGLKAGRCADYVVTGAWSAKAAEEAKKFGTINIVHPKLGSYTKIPDPSTWNLNPDASYVYYCANETVHGVEFDFIPDVKGAVLVCDMSSNFLSKPVDVSKFGVIFAGAQKNVGSAGVTVVIVRDDLLGFALRECPSVLEYKVQAGNSSLYNTPPCFSIYVMGLVLEWIKNNGGAAAMEKLSSIKSQTIYVIIDNSQGFYVCPVEPQNRSKMNIPFRIGNAKGDDALEKRFLDKALELNMLSLKGHRSVGGIRASLYNAVTIEDVQKLAAFMKKFLEMHQL

SEQ ID NO: 605 - protein, 370 aa, synthetic construct
MDAPRQVVNFGPGPAKLPHSVLLEIQKELLDYKGVGISVLEMSHRSSDFAKIINNTENLVRELLAVPDNYKVIFLQGGGCGQFSAVPLNLIGLKAGRCADYVVTGAWSAKAAEEAKKFGTINIVHPKLGSYTKIPDPSTWNLNPDASYVYYCANETVHAVEFDFIPDVKGAVLVCDMSSNFLSKPVDVSKFGVIFAGAQKNVGSAGVTVVIVRDDLLGFALRECPSVLEYKVQAGNSSLYNTPPCFSIYVMGLVLEWIKNNGGAAAMEKLSSIKSQTIYEIIDNSQGFYVCPVEPQNRSKMNIPFRIGNAKGDDALEKRFLDKALELNMLSLKGHRSVGGIRASLYNAVTIEDVQKLAAFMKKFLEMHQL

SEQ ID NO: 606 - protein, 370 aa, synthetic construct
MDAPRQVVNFGPGPAKLPHSVLLEIQKELLDYKGVGISVLEMSHRSSDFAKIINNTENLVRELLAVPDNYKVIFLQGGGCGQFSAVPLNLIGLKAGRCADYVVTGAWSAKAAEEAKKFGTINIVHPKLGSYTKIPDPSTWNLNPDASYVYYCANETVHGVEFDFIPDVKGAVLVCDMSSNFLSKPVDVSKFGVIFAGAQKNVGSAGVTVVIVRDDLLGFALREFPSVLEYKVQAGNSSLYNTPPCFSIYVMGLVLEWIKNNGGAAAMEKLSSIKSQTIYEIIDNSQGFYVCPVEPQNRSKMNIPFRIGNAKGDDALEKRFLDKALELNMLSLKGHRSVGGIRASLYNAVTIEDVQKLAAFMKKFLEMHQL

SEQ ID NO: 607 - protein, 370 aa, synthetic construct
MDAPRQVVNFGPGPAKLPHSVLLEIQKELLDYKGVGISVLEMSHRSSDFAKIINNTENLVRELLAVPDNYKVIFLQGGGCGQFSAVPLNLIGLKAGRCADYVVTGAWSAKAAEEAKKFGTINIVHPKLGSYTKIPDPSTWNLNPDASYAYYCANETVHGVEFDFIPDVKGAVLVCDMSSNFLSKPVDVSKFGVIFAGAQKNVGSAGVTVVIVRDDLLGFALRECPSVLEYKVQAGNSSLYNTPPCFSIYVMGLVLEWIKNNGGAAAMEKLSSIKSQTIYEIIDNSQGFYVCPVEPQNRSKMNIPFRIGNAKGDDALEKRFLDKALELNMLSLKGHRSVGGIRASLYNAVTIEDVQKLAAFMKKFLEMHQL

SEQ ID NO: 608 - protein, 370 aa, synthetic construct
MDAPRQVVNFGPGPAKLPHSVLLEIQKELLDYKGVGISVLEMSHRSSDFAKIINNTENLVRELLAVPDNYKVIFLQGGGCGQFSAVPLNLIGLKAGRCADYVVTGAWSAKAAEEARKFGTINIVHPKLGSYTKIPDPSTWNLNPDASYVYYCANETVHGVEFDFIPDVKGAVLVCDMSSNFLSKPVDVSKFGVIFAGAQKNVGSAGVTVVIVRDDLLGFALRECPSVLEYKVQAGNSSLYNTPPCFSIYVMGLVLEWIKNNGGAAAMEKLSSIKSQTIYEIIDNSQGFYVCPVEPQNRSKMNIPFRIGNAKGDDALEKRFLDKALELNMLSLKGHRSVGGIRASLYNAVTIEDVQKLAAFMKKFLEMHQL

SEQ ID NO: 609 - protein, 370 aa, synthetic construct
MDAPRQVVNFGPGPAKLPHSVLLEIQKELLDYKGVGISVLEMSHRSSDFAKIINNTENLVRELLAVPDNYKVIFLQGGGCGQFSAVPLNLIGLKAGRCADYVVTGAWSAKAAEEAKKFGTINIVHPKLGSYTKIPDPSTWNLNPDASYVYYCAHETVHGVEFDFIPDVKGAVLVCDMSSNFLSKPVDVSKFGVIFAGAQKNVGSAGVTVVIVRDDLLGFALRECPSVLEYKVQAGNSSLYNTPPCFSIYVMGLVLEWIKNNGGAAAMEKLSSIKSQTIYEIIDNSQGFYVCPVEPQNRSKMNIPFRIGNAKGDDALEKRFLDKALELNMLSLKGHRSVGGIRASLYNAVTIEDVQKLAAFMKKFLEMHQL

SEQ ID NO: 610 - protein, 370 aa, synthetic construct
MDAPRQVVNFGPGPAKLPHSVLLEIQKELLDYKGVGISVLEMSHRSSDFAKIINNTENLVRELLAVPDNYKVIFLQGGGCGQFSAVPLNLIGLKAGRCADYVVTGAWSAKAAEEAKKFGTINIVHPKLGSYTKIPDPSTWNLNPDASYVYYCANETVHGVEFDFIPDVKGAVLVCDMSSNFLSKPVDVSKFGVIFAGAQKNVGSAGVTVVIVRDDLLGFALRECPSVLEYKVQAGNSSLYNTPPCFSIYVMGLVLEWIKNNGDAAAMEKLSSIKSQTIYEIIDNSQGFYVCPVEPQNRSKMNIPFRIGNAKGDDALEKRFLDKALELNMLSLKGHRSVGGIRASLYNAVTIEDVQKLAAFMKKFLEMHQL

SEQ ID NO: 611 - protein, 370 aa, synthetic construct
MDAPRQVVNFGPGPAKLPHSVLLEIQKELLDYKGVGISVLEMSHRSSDFAKMINNTENLVRELLAVPDNYKVIFLQGGGCGQFSAVPLNLIGLKAGRCADYVVTGAWSAKAAEEAKKFGTINIVHPKLGSYTKIPDPSTWNLNPDASYVYYCANETVHGVEFDFIPDVKGAVLVCDMSSNFLSKPVDVSKFGVIFAGAQKNVGSAGVTVVIVRDDLLGFALRECPSVLEYKVQAGNSSLYNTPPCFSIYVMGLVLEWIKNNGGAAAMEKLSSIKSQTIYEIIDNSQGFYVCPVEPQNRSKMNIPFRIGNAKGDDALEKRFLDKALELNMLSLKGHRSVGGIRASLYNAVTIEDVQKLAAFMKKFLEMHQL

SEQ ID NO: 612 - protein, 370 aa, synthetic construct
MDAPRQVVNFGPGPAKLPHSVLLEIQKELLDYKGVGISVLEMSHRSSDFAKIINNTENLVRELLAVPDNYKVIFLQGGGCGQFSAVPLNLIGLKAGRCADYVVTGAWSAKAAEEAKKFGTINIVHPKLGSYTKIPDPSTWNLNPDASYVYYCANETVHGVEFDFIPDVKGAVLVCDMSSNFLSKPVDVSKFGVIFAGAQKNVGSAGVTVVIVRDDLLGFALRECPSVLEYKVQAGNSSLDNTPPCFSIYVMGLVLEWIKNNGGAAAMEKLSSIKSQTIYEIIDNSQGFYVCPVEPQNRSKMNIPFRIGNAKGDDALEKRFLDKALELNMLSLKGHRSVGGIRASLYNAVTIEDVQKLAAFMKKFLEMHQL

SEQ ID NO: 613 - protein, 370 aa, synthetic construct
MDAPRQVVNFGPGPAKLPHSVLLEIQKELLDYKGVGISVLEMSHRSSDFAKIINNTENLVRELLAVPDNYKVIFLQGGGCGQFSAVPLNLIGLKAGRCADYVVTGAWSAKAAEEAKKFGTINIVHPKLGSYTKIPDPSTWNLNPDASYVYYCANETVHGVEFDFIPDVKGAVLVCDMSSNFLSKPVDVSKFGVIFAGAQKNVGSAGVTVVIVRDDLLGFALRECPSVLEYKVQAGNSSLYNTPPCFSIYVMGLVLEWIKNNGGAAAMEKLSSIKSQTIYEIIDNSQGFYVCPVEPQNRSKMNIPFRIGNAKGDDALEKRFLDKALELNMLSLKGHRSVGGIRASLHNAVTIEDVQKLAAFMKKFLEMHQL

SEQ ID NO: 614 - protein, 370 aa, synthetic construct
MDAPRQVVNFGPGPAKLPHSVLLEIQKELLDYKGVGISVLEMSHRSSDFAKIINNTENLVRELLAVPDNYKVIFLQGGGCGQFSAVPLNLIGLKAGRCADYVVTGAWSAKAAEEAKKFGTINIVHPKLGSYTKIPDPSTWNLNPDASYVYYCANETVHGVEFDFIPDVKGAVLVCDMSSNFLSKPVDVSKFGVIFAGAQKNVGSAGVTVVIVRDDLLGFALRECPSVLEYKVQAGNSSLYNTPPCFSIYVMGLVLEWIKNNGGAAAMEKLSSIKSQTIYEIIDNSQGFYVCPVEPQNRSKMNIPFRIGNAKGDDALEKRFLDKALELNMLSLKGHRSVGGIRASLYNAVTIVDVQKLAAFMKKFLEMHQL

SEQ ID NO: 615 - protein, 370 aa, synthetic construct
MDAPRQVVNFGPGPAKLPHSVLLEIQKELLDYKGVGISVLEMSHRSSDFAKIINNTENLVRELLAVPDNYKVIFLQGGGCGQFSAVPLNLIGLKAGRCADYVVTGAWSAKAAEEAKKFGTINIVHPKLGSYTKIPDPSTWNLNPDASYVYYCANETVHGVEFDFIPDVKGAVLVCDMSSNFLSKPVDVSKFGVIFAGAQKNVGSAGVTVVIVRDDLLGFALRECPSVLDYKVQAGNSSLYNTPPCFSIYVMGLVLEWIKNNGGAAAMEKLSSIKSQTIYEIIDNSQGFYVCPVEPQNRSKMNIPFRIGNAKGDDALEKRFLDKALELNMLSLKGHRSVGGIRASLYNAVTIEDVQKLAAFMKKFLEMHQL

SEQ ID NO: 616 - protein, 370 aa, synthetic construct
MDAPRQVVNFGPGPAKLPHSVLLEIQKELLDYKGVGISVLEMSHRSSDFAKIINNTENLVRELLAVPDNYKVIFLQGGGCGQFSAVPLNLIGLKAGRCADYVVTGAWSAKAAEEAKKFGTINIVHPKLGSYTKIPDPSTWNLNPDASYVYYCANETVHGVEFDFIPDVKGAVLVCDMSSNVLSKPVDVSKFGVIFAGAQKNVGSAGVTVVIVRDDLLGFALRECPSVLEYKVQAGNSSLYNTPPCFSIYVMGLVLEWIKNNGGAAAMEKLSSIKSQTIYEIIDNSQGFYVCPVEPQNRSKMNIPFRIGNAKGDDALEKRFLDKALELNMLSLKGHRSVGGIRASLYNAVTIEDVQKLAAFMKKFLEMHQL

SEQ ID NO: 617 - protein, 370 aa, synthetic construct
MDAPRQVVNFGPGPAKLPHSVLLEIQKELLDYKGVGISVLEMSHRSSDFAKIINNTENLVRELLAVPDNYKVIFLQGGGCGQFSAFPLNLIGLKAGRCADYVVTGAWSAKAAEEAKKFGTINIVHPKLGSYTKIPDPSTWNLNPDASYVYYCANETVHGVEFDFIPDVKGAVLVCDMSSNFLSKPVDVSKFGVIFAGAQKNVGSAGVTVVIVRDDLLGFALRECPSVLEYKVQAGNSSLYNTPPCFSIYVMGLVLEWIKNNGGAAAMEKLSSIKSQTIYEIIDNSQGFYVCPVEPQNRSKMNIPFRIGNAKGDDALEKRFLDKALELNMLSLKGHRSVGGIRASLYNAVTIEDVQKLAAFMKKFLEMHQL

SEQ ID NO: 618 - protein, 370 aa, synthetic construct
MDAPRQVVNFGPGPAKLPHSVLLEIQKELLDYKGVGISVLEMSHRSSDFAKIINNTENLVRELLAVPDNYKVIFLQGGGCGQFSAVPLNLIGLKAGRCADYVVTGAWSAKAAEEAKKFGTINIVHPKLGSYTKIPDPSTWNLNPDASYVYYCANETVHGVEFDFIPDVKGAVLVCDMSSNFLSKPVDVSKFGVIFAAAQKNVGSAGVTVVIVRDDLLGFALRECPSVLEYKVQAGNSSLYNTPPCFSIYVMGLVLEWIKNNGGAAAMEKLSSIKSQTIYEIIDNSQGFYVCPVEPQNRSKMNIPFRIGNAKGDDALEKRFLDKALELNMLSLKGHRSVGGIRASLYNAVTIEDVQKLAAFMKKFLEMHQL

SEQ ID NO: 619 - protein, 370 aa, synthetic construct
MDAPRQVVNFGPGPAKLPHSVLLEIQKELLDYKGVGISVLEMSHRSSDFAKIINNTENLVRELLAVPDNYKVIFLQGGGCGQFSAVPLNLIGLKAGRCADYVVTGAWSAKAAEEAKKFGTINIVHPKLGSYTKIPDPSTWNLNPDASYVYYCANETVHGVEFDFIPDVKGAVLVCDMSSNFLSKPVVVSKFGVIFAGAQKNVGSAGVTVVIVRDDLLGFALRECPSVLEYKVQAGNSSLYNTPPCFSIYVMGLVLEWIKNNGGAAAMEKLSSIKSQTIYEIIDNSQGFYVCPVEPQNRSKMNIPFRIGNAKGDDALEKRFLDKALELNMLSLKGHRSVGGIRASLYNAVTIEDVQKLAAFMKKFLEMHQL

SEQ ID NO: 620 - protein, 370 aa, synthetic construct
MDAPRQVVNFGPGPAKLPHSVLLEIQKELLDYKGVGISVLEMSHRSSDFAKIINNTENLVRELLAVPDNYKVIFLQGGGCGQFSAVPLNLIGLKAGRCADYVVTGGWSAKAAEEAKKFGTINIVHPKLGSYTKIPDPSTWNLNPDASYVYYCANETVHGVEFDFIPDVKGAVLVCDMSSNFLSKPVDVSKFGVIFAGAQKNVGSAGVTVVIVRDDLLGFALRECPSVLEYKVQAGNSSLYNTPPCFSIYVMGLVLEWIKNNGGAAAMEKLSSIKSQTIYEIIDNSQGFYVCPVEPQNRSKMNIPFRIGNAKGDDALEKRFLDKALELNMLSLKGHRSVGGIRASLYNAVTIEDVQKLAAFMKKFLEMHQL

SEQ ID NO: 621 - protein, 370 aa, synthetic construct
MDAPRQVVNFGPGPAKLPHSVLLEIQKELLDYKGVGISVLEMSHRSSDFAKIITNTENLVRELLAVPDNYKVIFLQGGGCGQFSAVPLNLIGLKAGRCADYVVTGAWSAKAAEEAKKFGTINIVHPKLGSYTKIPDPSTWNLNPDASYVYYCANETVHGVEFDFIPDVKGAVLVCDMSSNFLSKPVDVSKFGVIFAGAQKNVGSAGVTVVIVRDDLLGFALRECPSVLEYKVQAGNSSLYNTPPCFSIYVMGLVLEWIKNNGGAAAMEKLSSIKSQTIYEIIDNSQGFYVCPVEPQNRSKMNIPFRIGNAKGDDALEKRFLDKALELNMLSLKGHRSVGGIRASLYNAVTIEDVQKLAAFMKKFLEMHQL

SEQ ID NO: 622 - protein, 370 aa, synthetic construct
MDAPRQVVNFGPGPAKLPHSVLLEIQKELLDYKGVGISVLEMSHRSSDFAKIINNTENLVRELLAVPDNYKVIFLQGGGCGQFSAVPLNLIGLKAGRCADYVVTGAWSAKAAEEAKKFGTINIVHPKLGSYTKIPDPSTWNLNPDASYVYYCANETVHGVELDFIPDVKGAVLVCDMSSNFLSKPVDVSKFGVIFAGAQKNVGSAGVTVVIVRDDLLGFALRECPSVLEYKVQAGNSSLYNTPPCFSIYVMGLVLEWIKNNGGAAAMEKLSSIKSQTIYEIIDNSQGFYVCPVEPQNRSKMNIPFRIGNAKGDDALEKRFLDKALELNMLSLKGHRSVGGIRASLYNAVTIEDVQKLAAFMKKFLEMHQL

SEQ ID NO: 623 - protein, 370 aa, synthetic construct
MDAPRQVVNFGPGPAKLPHSVLLEIQKELLDYKGVGISVLEMSHRSSDFAKIINNTENLVRELLAVPDNYKVIFLQGGGCGQFSAVPLNLIGLKAGRCADYVVTGAWSAKAAEEAKKFGTINIVHPKLGSYTKIPDPSTWNLNPDASYVYYCANETVHGVEFDFIPDVKGAVLVCDMSSNILSKPVDVSKFGVIFAGAQKNVGSAGVTVVIVRDDLLGFALRECPSVLEYKVQAGNSSLYNTPPCFSIYVMGLVLEWIKNNGGAAAMEKLSSIKSQTIYEIIDNSQGFYVCPVEPQNRSKMNIPFRIGNAKGDDALEKRFLDKALELNMLSLKGHRSVGGIRASLYNAVTIEDVQKLAAFMKKFLEMHQL

SEQ ID NO: 624 - protein, 370 aa, synthetic construct
MDAPRQVVNFGPGPAKLPHSVLLEIQKELLDYKGVGISVLEMSHRSSDFAKIINNTENLVRELLAVPDNYKVIFLQGGGCGQFSAVPLNLIGLKAGRCADYVVTGAWSAKAAEEAKKFGTINIVHPKLGSYTKIPDPSTWNLNPDASYVYYCANETVHGVEFDFIPDVKGAVLVCDMSSNFLSKPVDVSKFGVIFAGAQKNVGSAGVTVVIVRDDLLGFALRECPSVLEYKVQAGNSSLYNTPPCFSIYVMGLVLEWIKNNGGAAAMEKLSSIKSQTIYEIIDNSQGFYVCPVEPQNRSKMNIPFRIGNAKGDDALEKRFLDKALELNMLSLQGHRSVGGIRASLYNAVTIEDVQKLAAFMKKFLEMHQL

SEQ ID NO: 625 - protein, 370 aa, synthetic construct
MDAPRQVVNFGPGPAKLPHSVLLEIQKELLDYKGVGISVLEMSHRSSDFAKIINNTENLVRELLAVPDNYKVIFLQGGGCGQFSAVPLNLIGLKAGRCADYVVTGAWSAKAAEEAKKFGTINIVHPKLGSYTKIPAPSTWNLNPDASYVYYCANETVHGVEFDFIPDVKGAVLVCDMSSNFLSKPVDVSKFGVIFAGAQKNVGSAGVTVVIVRDDLLGFALRECPSVLEYKVQAGNSSLYNTPPCFSIYVMGLVLEWIKNNGGAAAMEKLSSIKSQTIYEIIDNSQGFYVCPVEPQNRSKMNIPFRIGNAKGDDALEKRFLDKALELNMLSLKGHRSVGGIRASLYNAVTIEDVQKLAAFMKKFLEMHQL

SEQ ID NO: 626 - protein, 370 aa, synthetic construct
MDAPRQVVNFGPGPAKLPHSVLLEIQKELLDYKGVGISVLEMSHRSSDFAKIINNTENLVRELLAVSDNYKVIFLQGGGCGQFSAVPLNLIGLKAGRCADYVVTGAWSAKAAEEAKKFGTINIVHPKLGSYTKIPDPSTWNLNPDASYVYYCANETVHGVEFDFIPDVKGAVLVCDMSSNFLSKPVDVSKFGVIFAGAQKNVGSAGVTVVIVRDDLLGFALRECPSVLEYKVQAGNSSLYNTPPCFSIYVMGLVLEWIKNNGGAAAMEKLSSIKSQTIYEIIDNSQGFYVCPVEPQNRSKMNIPFRIGNAKGDDALEKRFLDKALELNMLSLKGHRSVGGIRASLYNAVTIEDVQKLAAFMKKFLEMHQL

SEQ ID NO: 627 - protein, 370 aa, synthetic construct
MDAPRQVVNFGPGPAKLPHSVLLEIQKELLDYKGVGISVLEMSHRSSDFAKIINNTENLVRELLAVPDNYKVIFLQGGGCGQFSAVPLNLIGLKAGRCADYVVTGAWSAKAAEEAKKFGTINIVHPKLGSYTKIPGPSTWNLNPDASYVYYCANETVHGVEFDFIPDVKGAVLVCDMSSNFLSKPVDVSKFGVIFAGAQKNVGSAGVTVVIVRDDLLGFALRECPSVLEYKVQAGNSSLYNTPPCFSIYVMGLVLEWIKNNGGAAAMEKLSSIKSQTIYEIIDNSQGFYVCPVEPQNRSKMNIPFRIGNAKGDDALEKRFLDKALELNMLSLKGHRSVGGIRASLYNAVTIEDVQKLAAFMKKFLEMHQL

SEQ ID NO: 628 - protein, 370 aa, synthetic construct
MDAPRQVVNFGPGPAKLPHSVLLEIQKELLDYKGVGISVLEMSHRSSDFAKIINNTENLVRELLAVPDNYKVIFLQGGGCGQFSAVPLNLIGLKAGRCADYVVTGAWSAKAAEEAKKFGTINIVHPKLGSYTKIPDPSTWNLNPDASYVYYCANETVHGVEFDFIPDVKGAVLVCDMSSNFLSKPVDVSKFGVIFAGAQKNVGSAGVTVVIVRDDLLGFALRECPSVLEYKVQAGNSSLYNTPPCFSIYVMGLVLEWIKNNGGAAAMEKLSSIKSQTIYEIIDNSQGFYVCPVEPQNRSKMNIPFRIGNAKGDDALEKRFLDKALELNMLSLKGHRSVEGIRASLYNAVTIEDVQKLAAFMKKFLEMHQL

SEQ ID NO: 629 - protein, 370 aa, synthetic construct
MDAPRQVVNFGPGPAKLPHSVLLEIQKELLDYKGVGISVLEMSHRSSDFAKIINNTENLVRELLAVPANYKVIFLQGGGCGQFSAVPLNLIGLKAGRCADYVVTGAWSAKAAEEAKKFGTINIVHPKLGSYTKIPDPSTWNLNPDASYVYYCANETVHGVEFDFIPDVKGAVLVCDMSSNFLSKPVDVSKFGVIFAGAQKNVGSAGVTVVIVRDDLLGFALRECPSVLEYKVQAGNSSLYNTPPCFSIYVMGLVLEWIKNNGGAAAMEKLSSIKSQTIYEIIDNSQGFYVCPVEPQNRSKMNIPFRIGNAKGDDALEKRFLDKALELNMLSLKGHRSVGGIRASLYNAVTIEDVQKLAAFMKKFLEMHQL

SEQ ID NO: 630 - protein, 370 aa, synthetic construct
MDAPRQVVNFGPGPAKLPHSVLLEIQKELLDYKGVGISVLEMSHRSSDFAKIINNTENLVRELLAVPDNYKVIFLQGGGCGQFSAVPLNLIGLKAGRCADYVVTGAWSAKAAEEAKKFGTINIVHPKLGSYTKIPDPSTWNLNPDASYVYYCANETVHGVEFDFIPDVKGAVLVCDMSSNFLSKPVDVSKFGVIFAGAQKNVGSAGVTVVIVRDDLLGFALRECPSVLEYKVQAGNSSLYNTPPCFSIYVMGLVLECIKNNGGAAAMEKLSSIKSQTIYEIIDNSQGFYVCPVEPQNRSKMNIPFRIGNAKGDDALEKRFLDKALELNMLSLKGHRSVGGIRASLYNAVTIEDVQKLAAFMKKFLEMHQL

SEQ ID NO: 631 - protein, 370 aa, synthetic construct
MDAPRQVVNFGPGPAKLPHSVLLEIQKELLDYKGVGISVLEMSHRSSDFAKIINNTENLVRELLAVPDNYKVIFLQGGGCGQFSAVPLNLIGLKAGRCADYVVTGAWSAKAAEEAKKFGTINIVHPKLGSYTKIPDPSTWNLNPDASYVYYCANETVHGVEFDFIPDVKGAVLVCDMSSNFLSKPVDVSKFGVIFAGAQKNVGSAGVTVVIVRDDLLGFALRECPSVLEYKVQAGNSSLYNTPPCFSIYVMGLVLEWIKNNAGAAAMEKLSSIKSQTIYEIIDNSQGFYVCPVEPQNRSKMNIPFRIGNAKGDDALEKRFLDKALELNMLSLKGHRSVGGIRASLYNAVTIEDVQKLAAFMKKFLEMHQL

SEQ ID NO: 632 - protein, 370 aa, synthetic construct
MDAPRQVVNFGPGPAKLPHSVLLEIQKELLDYKGVGISVLEMSHRSSDFAKIINNTENLVRELLAVPDNYKVIFLQGGGCGQFSAVPLNLIGLKAGRCADYVVTGAWSAKAAEEAKKFGTINIVHPKLGSYTKIPDPSTWNLNPDASYVYYCANETVHGVEFDFIPDVKGAVLVCDMSSNFLSKPVDVSKFGVIFAGAQKNVGSAGVTVVIVRDDLLGFALRECPSVLEYKVQAGNSSLYNTPPCFSIYVMGLVLEWIKNNGGAAAMEKLSSIRSQTIYEIIDNSQGFYVCPVEPQNRSKMNIPFRIGNAKGDDALEKRFLDKALELNMLSLKGHRSVGGIRASLYNAVTIEDVQKLAAFMKKFLEMHQL

SEQ ID NO: 633 - protein, 370 aa, synthetic construct
MDAPRQVVNFGPGPAKLPHSVLLEIQKELLDYKGVGISVLEMSHRSSDFAKIINNTENLVRELLAVPDNYKVIFLQGGGCGQFIAVPLNLIGLKAGRCADYVVTGAWSAKAAEEAKKFGTINIVHPKLGSYTKIPDPSTWNLNPDASYVYYCANETVHGVEFDFIPDVKGAVLVCDMSSNFLSKPVDVSKFGVIFAGAQKNVGSAGVTVVIVRDDLLGFALRECPSVLEYKVQAGNSSLYNTPPCFSIYVMGLVLEWIKNNGGAAAMEKLSSIKSQTIYEIIDNSQGFYVCPVEPQNRSKMNIPFRIGNAKGDDALEKRFLDKALELNMLSLKGHRSVGGIRASLYNAVTIEDVQKLAAFMKKFLEMHQL

SEQ ID NO: 634 - protein, 370 aa, synthetic construct
MDAPRQVVNFGPGPAKLPHSVLLEIQKELLDYKGVGISVLEMSHRSSDFAKIINNTENLVRELLAVPDNYKVIFLQGGGCGQFSAVPLNLIGLKAGRCADYVVTGAWSAKAAEEAKKFGTINIVHPKLGSYTKIPDPSTWNLNPDASYVYYCANETVHGVEFDFIPDVKGAVLVCDMSSNFLSKPVDVSKFGVIFAGAQKNVGSAGVTVVIVRDDLLGFALRECPSVLEYKVQAGNSSLYNTPPCFSNYVMGLVLEWIKNNGGAAAMEKLSSIKSQTIYEIIDNSQGFYVCPVEPQNRSKMNIPFRIGNAKGDDALEKRFLDKALELNMLSLKGHRSVGGIRASLYNAVTIEDVQKLAAFMKKFLEMHQL

SEQ ID NO: 635 - protein, 370 aa, synthetic construct
MDAPRQVVNFGPGPAKLPHSVLLEIQKELLDYKGVGISVLEMSHRSSDFAKIINNTENLVRELLAVPDNYKVIFLQGGGCGQFSAVPLNLIGLKAGRCADYVVTGAWSAKAAEEAKKFGTINIVHPKLGSYTKIPDPSTWNLNPDASYVYYCANETVHCVEFDFIPDVKGAVLVCDMSSNFLSKPVDVSKFGVIFAGAQKNVGSAGVTVVIVRDDLLGFALRECPSVLEYKVQAGNSSLYNTPPCFSIYVMGLVLEWIKNNGGAAAMEKLSSIKSQTIYEIIDNSQGFYVCPVEPQNRSKMNIPFRIGNAKGDDALEKRFLDKALELNMLSLKGHRSVGGIRASLYNAVTIEDVQKLAAFMKKFLEMHQL

SEQ ID NO: 636 - protein, 370 aa, synthetic construct
MDAPRQVVNFGPGPAKLPHSVLLEIQKELLDYKGVGISVLEMSHRSSDFAKIINNTENLVRELLAVPDNYNVIFLQGGGCGQFSAVPLNLIGLKAGRCADYVVTGAWSAKAAEEAKKFGTINIVHPKLGSYTKIPDPSTWNLNPDASYVYYCANETVHGVEFDFIPDVKGAVLVCDMSSNFLSKPVDVSKFGVIFAGAQKNVGSAGVTVVIVRDDLLGFALRECPSVLEYKVQAGNSSLYNTPPCFSIYVMGLVLEWIKNNGGAAAMEKLSSIKSQTIYEIIDNSQGFYVCPVEPQNRSKMNIPFRIGNAKGDDALEKRFLDKALELNMLSLKGHRSVGGIRASLYNAVTIEDVQKLAAFMKKFLEMHQL

SEQ ID NO: 637 - protein, 370 aa, synthetic construct
MDAPRQVVNFGPGPAKLPHSVLLEIQKELLDYKGVGISVLEVSHRSSDFAKIINNTENLVRELLAVPDNYKVIFLQGGGCGQFSAVPLNLIGLKAGRCADYVVTGAWSAKAAEEAKKFGTINIVHPKLGSYTKIPDPSTWNLNPDASYVYYCANETVHGVEFDFIPDVKGAVLVCDMSSNFLSKPVDVSKFGVIFAGAQKNVGSAGVTVVIVRDDLLGFALRECPSVLEYKVQAGNSSLYNTPPCFSIYVMGLVLEWIKNNGGAAAMEKLSSIKSQTIYEIIDNSQGFYVCPVEPQNRSKMNIPFRIGNAKGDDALEKRFLDKALELNMLSLKGHRSVGGIRASLYNAVTIEDVQKLAAFMKKFLEMHQL

SEQ ID NO: 638 - protein, 370 aa, synthetic construct
MDAPRQVVNFGPGPAKLPHSVLLEIQKELLDYKGVGISVLEMSHRSSDFAKIINNTENLVRELLAVPDNYKVIFLQGGGCGQFSAVPLNLIGLKAGRCADYVVTGAWSAKAAEEAKKFGTINIVHPKLGSYTKIPDPSTWNLNPDASYVYYCANETVHGVEFDFIPDVKGAVLVCDMSSNFLSKPVDVSKFGVIFAGAQKNVGSAGVTVVIVRDDLLGFALRECPSVLEYKVQAGNSSLYNTPPCFSIYVMGLVLEWIKNNGGAAAMEKLSSIKSQTIYEIIDNSQGFYVCPVEPQNRSKMNIPFRIGNAKGDDALEKRFLDKALELNMLSLKGHRSVGGIRASLYNADTIEDVQKLAAFMKKFLEMHQL

SEQ ID NO: 639 - protein, 370 aa, synthetic construct
MDAPRQVVNFGPGPAKLPHSVLLEIQKELLDYKGVGISVLEMSHRSSDFAKIINNTENLVRELLAVPDNYKVIFLQGGGCGQFSAVPLNLIGLKAGRCADYVVTGAWSAKAAEEAKKFGTINIVHPKLGSYTKIPDPSTWNLNPDASYVYYCANETVHGVEFDFIPDVKGAVLVCDMSSNFLSKPVDVSKFGVIFAGAQKNVGSAGVTVVIVRDDLLGFALRECPSVLEYKVQAGNSSLYNTPPCFSIYVMGLVLEWIKNNGGAAAMEKLSSIKSQTIYEILDNSQGFYVCPVEPQNRSKMNIPFRIGNAKGDDALEKRFLDKALELNMLSLKGHRSVGGIRASLYNAVTIEDVQKLAAFMKKFLEMHQL

SEQ ID NO: 640 - protein, 370 aa, synthetic construct
MDAPRQVVNFGPGPAKLPHSVLLEIQKELLDYKGVGISVLEMSHRSSDFAKIINNTENLVRELLAVPDNYKVIFLQGGGCGQFSAVPLNLIGLKAGRCADYVVTGAWSAKAAEEAKKFGTINIVHPKLGSYTKIPDPSTWNLNPDASYVYYCANETVHGVEFDFIPDVKGAVLVCDMSSNFLSKPVDVSKFGVIFAGAQKNVGSAGVTVVIVRDDLLGFALRECPSVLEYKVQAGNSSLYNTPPCFSIYVMGLVLEWIKNNGGAAAMEKLSSIKSQTIYEIIDNSQGFYVCPVEPQNRSKMNIPFRIGNAKGDDALEKRFLDKALELYMLSLKGHRSVGGIRASLYNAVTIEDVQKLAAFMKKFLEMHQL

SEQ ID NO: 641 - protein, 370 aa, synthetic construct
MDAPRQVVNFGPGPAKLPHSVLLEIQKELLDYKGVGISVLEMSHRSSDFAKIINNTENLVRELLAVPDNYKVIFLQGGGCGQFSAVPLNLIGLKAGRCADYVVTGAWSAKAAEEAKKFGTINIVHPKLGSYTKIPDPSTWNLNPDASYVYYCANETVHGVEFDFIPDVKGAVLVCDMSSNFLSKPVDVSKFGVIFAGAQKNVGSAGVTVVIVRDDLLGFALRECPSVREYKVQAGNSSLYNTPPCFSIYVMGLVLEWIKNNGGAAAMEKLSSIKSQTIYEIIDNSQGFYVCPVEPQNRSKMNIPFRIGNAKGDDALEKRFLDKALELNMLSLKGHRSVGGIRASLYNAVTIEDVQKLAAFMKKFLEMHQL

SEQ ID NO: 642 - protein, 370 aa, synthetic construct
MDAPRQVVNFGPGPAKLPHSVLLEIQKELLDYKGVGISVLEMSHRSSDFAKIINNTENLVRELLAVPDNYKVIFLEGGGCGQFSAVPLNLIGLKAGRCADYVVTGAWSAKAAEEAKKFGTINIVHPKLGSYTKIPDPSTWNLNPDASYVYYCANETVHGVEFDFIPDVKGAVLVCDMSSNFLSKPVDVSKFGVIFAGAQKNVGSAGVTVVIVRDDLLGFALRECPSVLEYKVQAGNSSLYNTPPCFSIYVMGLVLEWIKNNGGAAAMEKLSSIKSQTIYEIIDNSQGFYVCPVEPQNRSKMNIPFRIGNAKGDDALEKRFLDKALELNMLSLKGHRSVGGIRASLYNAVTIEDVQKLAAFMKKFLEMHQL

SEQ ID NO: 643 - protein, 370 aa, synthetic construct
MDAPRQVVNFGPGPAKLPHSVLLEIQKELLDYKGVGISVLEMSHRSSDFAKIINNTENLVRELLAVPDNYKVIFLQGGGCGQFSAVPLNLIGLKAGRCADYVVTGAWSAKAAEEAKKFGTINIVHPKLGSYTKIPDPSTWNLNPDASYVYYCANETVHGVEFDFIPDVKGAVLVCDMSSNFLSKPVDVSKFGVIFAGAQKNVGSAGVTVVIGRDDLLGFALRECPSVLEYKVQAGNSSLYNTPPCFSIYVMGLVLEWIKNNGGAAAMEKLSSIKSQTIYEIIDNSQGFYVCPVEPQNRSKMNIPFRIGNAKGDDALEKRFLDKALELNMLSLKGHRSVGGIRASLYNAVTIEDVQKLAAFMKKFLEMHQL

SEQ ID NO: 644 - protein, 370 aa, synthetic construct
MDAPRQVVNFGPGPAKLPHSVLLEIQKELLDYKGVGISVLEMSHRSSDFAKIINNTENLVRELLAVPDNYKVIFLQGGGCGQFCAVPLNLIGLKAGRCADYVVTGAWSAKAAEEAKKFGTINIVHPKLGSYTKIPDPSTWNLNPDASYVYYCANETVHGVEFDFIPDVKGAVLVCDMSSNFLSKPVDVSKFGVIFAGAQKNVGSAGVTVVIVRDDLLGFALRECPSVLEYKVQAGNSSLYNTPPCFSIYVMGLVLEWIKNNGGAAAMEKLSSIKSQTIYEIIDNSQGFYVCPVEPQNRSKMNIPFRIGNAKGDDALEKRFLDKALELNMLSLKGHRSVGGIRASLYNAVTIEDVQKLAAFMKKFLEMHQL

SEQ ID NO: 645 - protein, 370 aa, synthetic construct
MDAPRQVVNFGPGPAKLPHSVLLEIQKELLDYKGVGISVLEMSHRSSDFAKIINNTENLVRELLAVPDNYKVIFLQGGGCGQFSAVPLNLIGLKAGRCADYVVTGAWSAKAAEEAKKFGTINIVHPKLGSYTKIPDPSTWNLNPDASYVYYCANETVHGVEFDFIPDVKGAVLVCDMSSNFLSKPVDVSKFGVIFAGAQKNVGSAGVTVVIVRDDLLGFALGECPSVLEYKVQAGNSSLYNTPPCFSIYVMGLVLEWIKNNGGAAAMEKLSSIKSQTIYEIIDNSQGFYVCPVEPQNRSKMNIPFRIGNAKGDDALEKRFLDKALELNMLSLKGHRSVGGIRASLYNAVTIEDVQKLAAFMKKFLEMHQL

SEQ ID NO: 646 - protein, 370 aa, synthetic construct
MDAPRQVVNFGPGPAKLPHSVLLEIQKELLDYKGVGISVLEMSHRSSDFAKIINNTENLVRELLAVPDNYKVIFLQGGGCGQFSAVPLNLIGLKAGRCADYVVTGAWSAKAAEEAKKFGTINIVHPKLGSYTKIPDPSTWNLNPDASYVYYCANETVHGVEFDFIPDVKGAVLVCDMSSNFLSKPVDVSKFGVIFAGAQKNVGSAGVTVVIVRDDLLGFALRECPSVLEYKVQAGNSSLYNTPPCFSIYVMGLVLEWIKNNGGAAAMEKLSSIKSQTIYEIIDNSQGFYVCPVEPQNRSKMNIPFRIGNAKGDDALEKRFLDKALQLNMLSLKGHRSVGGIRASLYNAVTIEDVQKLAAFMKKFLEMHQL

SEQ ID NO: 647 - protein, 370 aa, synthetic construct
MDAPRQVVNFGPGPAKLPHSVLLEIQKELLDYKGFGISVLEMSHRSSDFAKIINNTENLVRELLAVPDNYKVIFLQGGGCGQFSAVPLNLIGLKAGRCADYVVTGAWSAKAAEEAKKFGTINIVHPKLGSYTKIPDPSTWNLNPDASYVYYCANETVHGVEFDFIPDVKGAVLVCDMSSNFLSKPVDVSKFGVIFAGAQKNVGSAGVTVVIVRDDLLGFALRECPSVLEYKVQAGNSSLYNTPPCFSIYVMGLVLEWIKNNGGAAAMEKLSSIKSQTIYEIIDNSQGFYVCPVEPQNRSKMNIPFRIGNAKGDDALEKRFLDKALELNMLSLKGHRSVGGIRASLYNAVTIEDVQKLAAFMKKFLEMHQL

SEQ ID NO: 648 - protein, 370 aa, synthetic construct
MDAPRQVVNFGPGPAKLPHSVLLEIQKELLDYKGVGISVLEMIHRSSDFAKIINNTENLVRELLAVPDNYKVIFLQGGGCGQFSAVPLNLIGLKAGRCADYVVTGAWSAKAAEEAKKFGTINIVHPKLGSYTKIPDPSTWNLNPDASYVYYCANETVHGVEFDFIPDVKGAVLVCDMSSNFLSKPVDVSKFGVIFAGAQKNVGSAGVTVVIVRDDLLGFALRECPSVLEYKVQAGNSSLYNTPPCFSIYVMGLVLEWIKNNGGAAAMEKLSSIKSQTIYEIIDNSQGFYVCPVEPQNRSKMNIPFRIGNAKGDDALEKRFLDKALELNMLSLKGHRSVGGIRASLYNAVTIEDVQKLAAFMKKFLEMHQL

SEQ ID NO: 649 - protein, 370 aa, synthetic construct
MDAPRQGVNFGPGPAKLPHSVLLEIQKELLDYKGVGISVLEMSHRSSDFAKIINNTENLVRELLAVPDNYKVIFLQGGGCGQFSAVPLNLIGLKAGRCADYVVTGAWSAKAAEEAKKFGTINIVHPKLGSYTKIPDPSTWNLNPDASYVYYCANETVHGVEFDFIPDVKGAVLVCDMSSNFLSKPVDVSKFGVIFAGAQKNVGSAGVTVVIVRDDLLGFALRECPSVLEYKVQAGNSSLYNTPPCFSIYVMGLVLEWIKNNGGAAAMEKLSSIKSQTIYEIIDNSQGFYVCPVEPQNRSKMNIPFRIGNAKGDDALEKRFLDKALELNMLSLKGHRSVGGIRASLYNAVTIEDVQKLAAFMKKFLEMHQL

SEQ ID NO: 650 - protein, 370 aa, synthetic construct
MDAPRQVVNFGPGPAKLPHSVLLEIQKELLDYKGVGISVLEMSHRSSDFAKIINNTENLVRELLAVPDNYKVIFLQGGGCGQFSAVPLNLIGLKAGRCADYVVTGAWSAKAAEEAKKFGTINIVHPKLGSYTKIPDPSTWNLNPDASYVYYCANETVHGVEFDFIPDVKGAVLVCDMSSNFLTKPVDVSKFGVIFAGAQKNVGSAGVTVVIVRDDLLGFALRECPSVLEYKVQAGNSSLYNTPPCFSIYVMGLVLEWIKNNGGAAAMEKLSSIKSQTIYEIIDNSQGFYVCPVEPQNRSKMNIPFRIGNAKGDDALEKRFLDKALELNMLSLKGHRSVGGIRASLYNAVTIEDVQKLAAFMKKFLEMHQL

SEQ ID NO: 651 - protein, 370 aa, synthetic construct
MDAPRQVVNFGPGPAKLPHSVLLEIQKELLDYKGVGISVLEMSHRSSDFAKIINNTENLVRELLAVPDNYKVIFLHGGGCGQFSAVPLNLIGLKAGRCADYVVTGAWSAKAAEEAKKFGTINIVHPKLGSYTKIPDPSTWNLNPDASYVYYCANETVHGVEFDFIPDVKGAVLVCDMSSNFLSKPVDVSKFGVIFAGAQKNVGSAGVTVVIVRDDLLGFALRECPSVLEYKVQAGNSSLYNTPPCFSIYVMGLVLEWIKNNGGAAAMEKLSSIKSQTIYEIIDNSQGFYVCPVEPQNRSKMNIPFRIGNAKGDDALEKRFLDKALELNMLSLKGHRSVGGIRASLYNAVTIEDVQKLAAFMKKFLEMHQL

SEQ ID NO: 652 - protein, 370 aa, synthetic construct
MDAPRQVVNFGPGPAKLPHSVLLEIQKELLDYKGVGISVLEMSHRSSDFAKIINNTENLVRELLAVPDNYKVIFLQGGGCGQFSAVPLNLIGLKAGRCADYVVTGAWSAKAAEEAKKFGTINIVHPKLGSYTKIPDPSTWNLNPDASYVYYCANETVHGVEFDFIPDVKGAVLVCDMSSNFLSKPVDVSRFGVIFAGAQKNVGSAGVTVVIVRDDLLGFALRECPSVLEYKVQAGNSSLYNTPPCFSIYVMGLVLEWIKNNGGAAAMEKLSSIKSQTIYEIIDNSQGFYVCPVEPQNRSKMNIPFRIGNAKGDDALEKRFLDKALELNMLSLKGHRSVGGIRASLYNAVTIEDVQKLAAFMKKFLEMHQL

SEQ ID NO: 653 - protein, 370 aa, synthetic construct
MDAPRQVVNFGPGPAKLPHSVLLEIQKELLDYKGVGISVLEMSHRSSDFAKIINNTENLVRELLALPDNYKVIFLQGGGCGQFSAVPLNLIGLKAGRCADYVVTGAWSAKAAEEAKKFGTINIVHPKLGSYTKIPDPSTWNLNPDASYVYYCANETVHGVEFDFIPDVKGAVLVCDMSSNFLSKPVDVSKFGVIFAGAQKNVGSAGVTVVIVRDDLLGFALRECPSVLEYKVQAGNSSLYNTPPCFSIYVMGLVLEWIKNNGGAAAMEKLSSIKSQTIYEIIDNSQGFYVCPVEPQNRSKMNIPFRIGNAKGDDALEKRFLDKALELNMLSLKGHRSVGGIRASLYNAVTIEDVQKLAAFMKKFLEMHQL

SEQ ID NO: 654 - protein, 370 aa, synthetic construct
MDAPRQVVNFGPGPAKLPHSVLLEIQKELLDYKGVGISVLEMSHRSSDFAKIINNTENLVRELLAVPDNYKVIFLQGGGCGQFSAVPLNLIGLKAGRCADYVVTGAWSAKAAEEAKKFGTINIVHPKLGRYTKIPDPSTWNLNPDASYVYYCANETVHGVEFDFIPDVKGAVLVCDMSSNFLSKPVDVSKFGVIFAGAQKNVGSAGVTVVIVRDDLLGFALRECPSVLEYKVQAGNSSLYNTPPCFSIYVMGLVLEWIKNNGGAAAMEKLSSIKSQTIYEIIDNSQGFYVCPVEPQNRSKMNIPFRIGNAKGDDALEKRFLDKALELNMLSLKGHRSVGGIRASLYNAVTIEDVQKLAAFMKKFLEMHQL

SEQ ID NO: 655 - protein, 370 aa, synthetic construct
MDAPRQVVNFGPGPAKLPHSVLLEIQKELLDYKGVGISVLEMSHRSSDFAKIINNTENLVRELLAVPDNYKVIFLQGGGCGQFSAVPLNLIGLKAGRCADYVVTGAWSAKAAEEAKKFGTINIVHPKLGSYTKIPDPSTWNLNPDASYVYYCANETVHGVEFDFIPDVKGAVLVCDMSSNFLSKPVDVSKFGVIFAGAQKNVGSAGVTVVIVRDDLLGFALRECPSVLEYKVQAGNSSLYNTPPCFSIYVMGLVLEWIKNNGGAAAMEKLSSIKSETIYEIIDNSQGFYVCPVEPQNRSKMNIPFRIGNAKGDDALEKRFLDKALELNMLSLKGHRSVGGIRASLYNAVTIEDVQKLAAFMKKFLEMHQL

SEQ ID NO: 656 - protein, 370 aa, synthetic construct
MDAPRQVVNFGPGPAKLPHSVLLEIQKELLDYKGVGISVLEMSHRSSDFAKIINNTENLVRELLAVPDNYKVIFLQGGGCGQFSAVPLNLIGLKAGRCADYVVTGAWSAKAAEEAKKFGTINIVHPKLGSYTKIPDPSTWNLNPDASYVYYCANETVHGVEFDFIPDVKGAVLVCDMSSNFLSKPVDVSKFGVIFAGAQKNVGSAGVTVVIVRDDLLGFALRECPSVLEYKVQAGNSSLYNTPPCFSIYVMGLVLEWIKNNGGAAAMEKLSSIKSQTIYEIIDNSQGFYVCPVEPQNRSKMNIPIRIGNAKGDDALEKRFLDKALELNMLSLKGHRSVGGIRASLYNAVTIEDVQKLAAFMKKFLEMHQL

SEQ ID NO: 657 - protein, 370 aa, synthetic construct
MDAPRQVVNFGPGPAKLPHSVLLEIQKELLDYKGVGISVIEMSHRSSDFAKIINNTENLVRELLAVPDNYKVIFLQGGGCGQFSAVPLNLIGLKAGRCADYVVTGAWSAKAAEEAKKFGTINIVHPKLGSYTKIPDPSTWNLNPDASYVYYCANETVHGVEFDFIPDVKGAVLVCDMSSNFLSKPVDVSKFGVIFAGAQKNVGSAGVTVVIVRDDLLGFALRECPSVLEYKVQAGNSSLYNTPPCFSIYVMGLVLEWIKNNGGAAAMEKLSSIKSQTIYEIIDNSQGFYVCPVEPQNRSKMNIPFRIGNAKGDDALEKRFLDKALELNMLSLKGHRSVGGIRASLYNAVTIEDVQKLAAFMKKFLEMHQL

SEQ ID NO: 658 - protein, 370 aa, synthetic construct
MDAPRQVVNFGPGPAKLPHSVLLEIQKELLDYKGVGISVLEMSHRSSDFAKIINNTENLVRELLAVPDNYKVIFLQGGGCGQFSAVPLNLIGLKAGRCADYVVTGAWSAKAAEEAKKFGTINIVHPKLGSYTKIPDPSTWNLNPDASYVYYCANETVHGVEFDFIPDVKGAVLVCDMSSNFLSKPVDVSKFGVIFAGAQKNVGSAGVTVVIVRDDLLGFALRECPSVLEYKVQAGNSSLYNTPPCFSIYVMGLVLEWIKNNGGAAAMEKLSSIKSQTIYEIIDNSQRFYVCPVEPQNRSKMNIPFRIGNAKGDDALEKRFLDKALELNMLSLKGHRSVGGIRASLYNAVTIEDVQKLAAFMKKFLEMHQL

SEQ ID NO: 659 - protein, 370 aa, synthetic construct
MDAPRQVVNFGPGPAKLPHSVLLEIQKELLDYKGVGISVLEMSHRSSDFAKIINNTENLVRELLAVPDNYKVIFLQGGGCGQFSAVPLNLIGLKAGRCADYVVSGAWSAKAAEEAKKFGTINIVHPKLGSYTKIPDPSTWNLNPDASYVYYCANETVHGVEFDFIPDVKGAVLVCDMSSNFLSKPVDVSKFGVIFAGAQKNVGSAGVTVVIVRDDLLGFALRECPSVLEYKVQAGNSSLYNTPPCFSIYVMGLVLEWIKNNGGAAAMEKLSSIKSQTIYEIIDNSQGFYVCPVEPQNRSKMNIPFRIGNAKGDDALEKRFLDKALELNMLSLKGHRSVGGIRASLYNAVTIEDVQKLAAFMKKFLEMHQL

SEQ ID NO: 660 - protein, 370 aa, synthetic construct
MDAPRQVVNFGPGPAKLPHSVLLEIQKELLDYKGVGISVLEMSHRSSDFAKIINNTENLVRELLAVPDNYKVIFLQGGGCGQFSAVPLNLIGLKAGRCADYVVTGAWSAKAAEEAKKFGTINIVHPKLGSYTKIPDPSTWNLNPDASYVYYCANETVHGVEFDFIPDVKGAVLVCDMSSNFLSKPVDVSKFGVIFAGAQKNVGSAGVTVVIVRDDLLGFALRECPSVLEYKVQAGNSSLYNTPPCFSIYVMGLVLEWIKNNGGAAAMEKLSSIKSQTIYEIIDNSQGFYVCPVEPQNRSKMNIPFRIGNAKGDDALEKRFLDKALELNMLSLKGHRSVGGIRGSLYNAVTIEDVQKLAAFMKKFLEMHQL

SEQ ID NO: 661 - protein, 370 aa, synthetic construct
MDAPRQVVNFGPGPAKLPHSVLLEIQKELLDYKGVGISVLEMSHRSSDFAKIINNTENLVRELLAVPDNYKVIFLQGGGCGQFSAVPLNLIGLKAGRCADYVVTGAWSAKAAEEAKKFGTINIVHPKLGSYTKIPDPSTWNLNPDASYVYYCANETVHGVEFDFIPVVKGAVLVCDMSSNFLSKPVDVSKFGVIFAGAQKNVGSAGVTVVIVRDDLLGFALRECPSVLEYKVQAGNSSLYNTPPCFSIYVMGLVLEWIKNNGGAAAMEKLSSIKSQTIYEIIDNSQGFYVCPVEPQNRSKMNIPFRIGNAKGDDALEKRFLDKALELNMLSLKGHRSVGGIRASLYNAVTIEDVQKLAAFMKKFLEMHQL

SEQ ID NO: 662 - protein, 370 aa, synthetic construct
MDAPRQVVNFGPGPAKLPHSVLLEIQKELLDYKGVGISVLEMSHRSSDFAKIINNTENLVRELLAVPDNYKVIFLQGGGCGQFSAVPLNLIGLKAGRCADYVVTGAWSAKAAEEAKKFGTINIVHPKLGSYTKIPDPSTWNLNPDASYVYYCANETVHGVEFDFIPDVKGAVLVCDMSSNFLSKPVDVSKFGVIFAGAQKNVGSAGVTVVIVRDDLLGFALRECPSVLEYKVQAVNSSLYNTPPCFSIYVMGLVLEWIKNNGGAAAMEKLSSIKSQTIYEIIDNSQGFYVCPVEPQNRSKMNIPFRIGNAKGDDALEKRFLDKALELNMLSLKGHRSVGGIRASLYNAVTIEDVQKLAAFMKKFLEMHQL

SEQ ID NO: 663 - protein, 370 aa, synthetic construct
MDAPRQVVNFGPGPAKLPHSVLLEIQKELLDYKGVGISVLEMSHRSSDFAKIINNTENLVRELLAVPDNYKVIFLQGGGCGQFSAVPLNLIGLKAGRCADYVVTGAWSAKAAEEAKKFGTINIVHPKLGSYTKIPDPSTWNLNPDASYVYYCANETVHGVEFDFIPDVKGAVLVCDMSSNFLSKPVDVSKFGVIFAGAQKNVGSAGVTVVIVRDDLLGFVLRECPSVLEYKVQAGNSSLYNTPPCFSIYVMGLVLEWIKNNGGAAAMEKLSSIKSQTIYEIIDNSQGFYVCPVEPQNRSKMNIPFRIGNAKGDDALEKRFLDKALELNMLSLKGHRSVGGIRASLYNAVTIEDVQKLAAFMKKFLEMHQL

SEQ ID NO: 664 - protein, 370 aa, synthetic construct
MDAPRQVVNFGPGPAKLPHSVLLEIQKELLDYKGVGISVLEMSHRSSDFAKIINNTENLVRELLAVPDNYKVIFLQGGGCGQFSAVPLNLIGLKAGRCADYVVTGAWSAKAAEEAKKFGTINIVHPKLGSYTKIPDPSTWNLNPDASYVYYCANETVHGVEFDFIPDVKGAVLVCDMSSNFLSKPVDVSKFGVIFAGAQKNVGSAGVTVVIVRDDLLGFALRECPSVLEYKVQAGNSSLYNTPPCFSIYVMGLDLEWIKNNGGAAAMEKLSSIKSQTIYEIIDNSQGFYVCPVEPQNRSKMNIPFRIGNAKGDDALEKRFLDKALELNMLSLKGHRSVGGIRASLYNAVTIEDVQKLAAFMKKFLEMHQL

SEQ ID NO: 665 - protein, 370 aa, synthetic construct
MDAPRQVVNFGPGPAKLPHSVLLEIQKELLDYKGVGISVLEMSHRSSDFAKIINNTENLVRELLAVPDNYKVIFLQVGGCGQFSAVPLNLIGLKAGRCADYVVTGAWSAKAAEEAKKFGTINIVHPKLGSYTKIPDPSTWNLNPDASYVYYCANETVHGVEFDFIPDVKGAVLVCDMSSNFLSKPVDVSKFGVIFAGAQKNVGSAGVTVVIVRDDLLGFALRECPSVLEYKVQAGNSSLYNTPPCFSIYVMGLVLEWIKNNGGAAAMEKLSSIKSQTIYEIIDNSQGFYVCPVEPQNRSKMNIPFRIGNAKGDDALEKRFLDKALELNMLSLKGHRSVGGIRASLYNAVTIEDVQKLAAFMKKFLEMHQL

SEQ ID NO: 666 - protein, 370 aa, synthetic construct
MDAPRQVVNFGPGPAKLPHSVLLEIQKELLDYKGVGISVLEMSHRSSDFAKIINNTENLVRELLAVPDNYKVIFLQGGGCGQFSAVPLNLIGLKAGRCADYVVTGAWSAKAAEEAKKFGTINIVHPKLGSYTKIPDPSTWNLNPDASYVYYCANETGHGVEFDFIPDVKGAVLVCDMSSNFLSKPVDVSKFGVIFAGAQKNVGSAGVTVVIVRDDLLGFALRECPSVLEYKVQAGNSSLYNTPPCFSIYVMGLVLEWIKNNGGAAAMEKLSSIKSQTIYEIIDNSQGFYVCPVEPQNRSKMNIPFRIGNAKGDDALEKRFLDKALELNMLSLKGHRSVGGIRASLYNAVTIEDVQKLAAFMKKFLEMHQL

SEQ ID NO: 667 - protein, 370 aa, synthetic construct
MDAPRQVVNFGPGPAKLPHSVLLEIQKELLDYKGVGISVLEMSHRSSDFAKIINNTENLVRELLAVPDNYKVIFLQGGGCGQFSAVPLNLIGLKAGRCADYVVTGAWSAKAAEEAKKFGTINIVHPKLGSYTKIPDPSTWNLNPDASYVYYCANETVHGVEFDFIPDVKGAVLVCDMSSNFLSKPVDVSKFGVIFAGAQKNVGSAGVTVVIVHDDLLGFALRECPSVLEYKVQAGNSSLYNTPPCFSIYVMGLVLEWIKNNGGAAAMEKLSSIKSQTIYEIIDNSQGFYVCPVEPQNRSKMNIPFRIGNAKGDDALEKRFLDKALELNMLSLKGHRSVGGIRASLYNAVTIEDVQKLAAFMKKFLEMHQL

SEQ ID NO: 668 - protein, 370 aa, synthetic construct
MDAPRQVVNFGPGPAKLPHSVLLEIQKELLDYKGVGISVLEMSHRSSDFAKIINNTENLVRELLAVPDNYKVIFLQGGGCGQFSAVPLNLIGLKAGRCADYVVTGAWSAKAAEEAKKFGTINIVHPKLGSYTKIPDPSTWNLNPDASYVYYCANETVHGVEFDFIPDVKGAVLVCDMSSNFLSKPVDVSKFGVIFAGAQKNVGSAGVTVVIVRDDLLGFALRECPSVLEYKVQAGNSSVYNTPPCFSIYVMGLVLEWIKNNGGAAAMEKLSSIKSQTIYEIIDNSQGFYVCPVEPQNRSKMNIPFRIGNAKGDDALEKRFLDKALELNMLSLKGHRSVGGIRASLYNAVTIEDVQKLAAFMKKFLEMHQL

SEQ ID NO: 669 - protein, 370 aa, synthetic construct
MDAPRQVVNFGPGPAKLPHSVLLEIQKELLDYKGVGISVLEMSHRSSDFAKIINNTENLVRELLAVPDNYKVIFLQGGGCGQFSAVPLNLIGLKAGRCADYVVTGAWSAKAAEEAKKFGTINIVHPKLGSYTKIPDPSTWNLNPDASYVYYCANETVHGVEFDFIPDVKGAVLVCDMSSNFLSKPVDVSKFGVIFAGAQKNVGSAGVTVVIVRDDLLGFALRECPSVLEYKVQAGNSPLYNTPPCFSIYVMGLVLEWIKNNGGAAAMEKLSSIKSQTIYEIIDNSQGFYVCPVEPQNRSKMNIPFRIGNAKGDDALEKRFLDKALELNMLSLKGHRSVGGIRASLYNAVTIEDVQKLAAFMKKFLEMHQL

SEQ ID NO: 670 - protein, 370 aa, synthetic construct
MDAPRQVVNFGPGPAKLPHSVLLEIQKELLDYKGVGISVLEMSHRSSDFAKIINNTENLVRELLAVPDNYKVIFLQGGGCGQFSAVPLNLIGLKAGRCADYVVTGAWSAKAAEEAKKFGTINIVHPKLGSYTKIPDPSTWNLNPDASYVYYCANETVHGVEFDFIPDVKGAVLVCDMSSNFLSKPVHVSKFGVIFAGAQKNVGSAGVTVVIVRDDLLGFALRECPSVLEYKVQAGNSSLYNTPPCFSIYVMGLVLEWIKNNGGAAAMEKLSSIKSQTIYEIIDNSQGFYVCPVEPQNRSKMNIPFRIGNAKGDDALEKRFLDKALELNMLSLKGHRSVGGIRASLYNAVTIEDVQKLAAFMKKFLEMHQL

SEQ ID NO: 671 - protein, 370 aa, synthetic construct
MDAPRQVVNFGPGPAKLPHSVLLEIQKELLDYKGVGISVLEMSHRSSDFAKIINNTENLVRELLAVPDNYKVIFLQGGGCGQFSAVPLNLIGLKAGRCADYVVTGAWSAKAAEEAKKFGTINIVHPKLGSYTKIPDPSTWNLNPDASYVYYCANETVHGVEFDFIPDVKGAVLVCDMSSNFLSKPVDVSKFGVIFAGAQKNVGSAGVTVVIVRDDLLGFALRECPSVLEYKVQAGNSSLYNTPPCFSIYVMGLVLEWIKNNGGAAAMEKLSSIKSQTIYEIIDNSQGFYVCPVEPQNRSKMSIPFRIGNAKGDDALEKRFLDKALELNMLSLKGHRSVGGIRASLYNAVTIEDVQKLAAFMKKFLEMHQL

SEQ ID NO: 672 - protein, 370 aa, synthetic construct
MDAPRQVVNFGPGPAKLPHSVLLEIQKELLDYKGVGISVLEMSHRSSDFAKIINNTENLVRELLAVPDNYKVIFLQGGGCGQFSAVPLNLIGLKAGRCADYVVTGAWSAKAAEEAKKFGTINIVHPKLGSYTKIPDPSTWNLNPDASYVYYCANETVHGVEFDFIPDVKGAVLVCDMSSNFLSKPVDVSKFGVIFAGAQKNVGSAGVTVVIVRDDLLGFALRECPSVLEYKVQAGNSSLYNTPPCFSIYVMGLVLEWIKNNGGAAAMEKLSSIKCQTIYEIIDNSQGFYVCPVEPQNRSKMNIPFRIGNAKGDDALEKRFLDKALELNMLSLKGHRSVGGIRASLYNAVTIEDVQKLAAFMKKFLEMHQL

SEQ ID NO: 673 - protein, 370 aa, synthetic construct
MDAPRQVVNFGPGPAKLPHSVLLEIQKELLDYKGVGISVLEMSHRSSDFAKIINNTENLVRELLAVPDNYKVIFLQGGGCGQFSAVPLNLIGLKAGRCADYVVTGAWSAKAAEEAKKFGTINIVHPKLGSYTKIPDPSTWNLNPDASYVYYCANETVHGVEFDFIPDVKGAVLVCDMSSNFLSKPVDVSKFGVIFAGAQKNVGSAGVTVVIVRDDLLGFALRECPSVLEYKVQAGNSSLYNTPPCFSIYVMGLVLEWIKNNGGAAAMEKLSSIKSQTIYEIIDNSQGFYVCPVEPQNRSKMNIPFRIGNAKGDDALEKRFLDKALELNMLSLKGHRSVAGIRASLYNAVTIEDVQKLAAFMKKFLEMHQL

SEQ ID NO: 674 - protein, 370 aa, synthetic construct
MDAPRQVVNFGPGPAKLPHSVLLEIQKELLDYKGVGISVLEMSHRSSDFAKIINNTENLVRELLAVPDNYKVIFLQGGGCGQFSAVPLNLIGLKAGRCADYVVTGAWSAKAAEEAKKFGTINIVHPKLGSYTKIPDPSTWNLNPDASYVYYCANETVHGVEFDFIPDVKGAVLVCDMSSNFLSKPVDVSKFGVIFAGAQKNVGSAGVTVVIVRDDLMGFALRECPSVLEYKVQAGNSSLYNTPPCFSIYVMGLVLEWIKNNGGAAAMEKLSSIKSQTIYEIIDNSQGFYVCPVEPQNRSKMNIPFRIGNAKGDDALEKRFLDKALELNMLSLKGHRSVGGIRASLYNAVTIEDVQKLAAFMKKFLEMHQL

SEQ ID NO: 675 - protein, 370 aa, synthetic construct
MDAPRQVVNFGPGPAKLPHSVLLEIQKELLDYKGVGISVLEMSHRSSDFAKIINNTENLVRELLAVPDNYKVIFLQGGGCGQFSAVPLNLIGLKAGRCADYVVTGAWSAKAAEEAKKFGTINIVHPKLGSYTKIPDPSTWNLNPDASYVYYCANETVHGVEFDFIPDVKGAVLVCDMSSNFLSKPVDVSKFGVIFTGAQKNVGSAGVTVVIVRDDLLGFALRECPSVLEYKVQAGNSSLYNTPPCFSIYVMGLVLEWIKNNGGAAAMEKLSSIKSQTIYEIIDNSQGFYVCPVEPQNRSKMNIPFRIGNAKGDDALEKRFLDKALELNMLSLKGHRSVGGIRASLYNAVTIEDVQKLAAFMKKFLEMHQL

SEQ ID NO: 676 - protein, 370 aa, synthetic construct
MDAPRQVVNFGPGPAKLPHSVLLEIQKELLDYKGVGISVLEMSHRSSDFAKIINNTENLVRELLAVPDNYKVIFLQGGGCGQFSAVPLNLIGLKAGRCADYVVTGAWSAKAAEEAKKFGTINIVHPKLGSYTKIPDPSTWNLNPDASYVYYCANETVHGVEFDFIPDVKGAVLVCDMSSNFLSKPVDVSKFGVIFAGAQKNVGSAGVTVVIVRDDLLGFPLRECPSVLEYKVQAGNSSLYNTPPCFSIYVMGLVLEWIKNNGGAAAMEKLSSIKSQTIYEIIDNSQGFYVCPVEPQNRSKMNIPFRIGNAKGDDALEKRFLDKALELNMLSLKGHRSVGGIRASLYNAVTIEDVQKLAAFMKKFLEMHQL

SEQ ID NO: 677 - protein, 370 aa, synthetic construct
MDAPRQVVNFGPGPAKLPHSVLLEIQKELLDYKGVGISVLEMSHRSSDFAKIINNTENLVRELLAVPDNYKVIFLQGGGCGQFSAVPLNLIGLKAGRCADYVVTGAWSAKAAEEAKKFGTINIVHPKLGSYTKIPDPSTWNLNPDASYVYYCANETVHGVEFDFIPDVKGAVLVCDMSSNFLSKPVDVSKFGVIFAGAQKNVGSAGVIVVIVRDDLLGFALRECPSVLEYKVQAGNSSLYNTPPCFSIYVMGLVLEWIKNNGGAAAMEKLSSIKSQTIYEIIDNSQGFYVCPVEPQNRSKMNIPFRIGNAKGDDALEKRFLDKALELNMLSLKGHRSVGGIRASLYNAVTIEDVQKLAAFMKKFLEMHQL

SEQ ID NO: 678 - protein, 370 aa, synthetic construct
MDAPRQVVNFGPGPAKLPHSVLLEIQKELLDYKGVGISVLEMSHRSSDFAKIINNTENLVRELLAVPDNYKVIFLQGGGCGQFSAVPLNLIGLKAGRCAEYVVTGAWSAKAAEEAKKFGTINIVHPKLGSYTKIPDPSTWNLNPDASYVYYCANETVHGVEFDFIPDVKGAVLVCDMSSNFLSKPVDVSKFGVIFAGAQKNVGSAGVTVVIVRDDLLGFALRECPSVLEYKVQAGNSSLYNTPPCFSIYVMGLVLEWIKNNGGAAAMEKLSSIKSQTIYEIIDNSQGFYVCPVEPQNRSKMNIPFRIGNAKGDDALEKRFLDKALELNMLSLKGHRSVGGIRASLYNAVTIEDVQKLAAFMKKFLEMHQL

SEQ ID NO: 679 - protein, 370 aa, synthetic construct
MDAPRQVVNFGPGPAKLPHSVLLEIQKELLDYKGVGISVLEMSHRSSDFAKIINNTENLVRELLAVPDNYKVIFLQGGGCGQFSAVPLNLIGLKAGRCADYVVTGAWSAKAAEEAKKFGTINIVHPKLGSYTKIPDPSTWNLNPDASYVYYCANETVHGVEFDFIPDVKGAVLVCDMSSNFLSKPVDVSKFGVIFAGAQKNVGSAGVTVVIVRDDLLGFALRECPSVLEYKVQAGNSSLYNTPPCFCIYVMGLVLEWIKNNGGAAAMEKLSSIKSQTIYEIIDNSQGFYVCPVEPQNRSKMNIPFRIGNAKGDDALEKRFLDKALELNMLSLKGHRSVGGIRASLYNAVTIEDVQKLAAFMKKFLEMHQL

SEQ ID NO: 680 - protein, 370 aa, synthetic construct
MDAPRQVVNFGPGPAKLPHSVLLEIQKELLDYKGVGISVLEMSHRSSDFAKIINNTENLVRELLAVPDNYKVIFLQGGGCGQFSAVPLNLIGLKAGRCADYVVTGAWSAKAAEEAKKFGTINIVHPKLGSYTKIPDPSTWNLNPDASYVYYCANETVHGVEFDFIPDVKGAVLVCDMSSNFLSKPVDVSKFGVIFAGAQKNVGSAGVTVVIVRDDLLGFALRECPSVLEYKVQAGNSSLYNTPPCFSIYVMGLVLEWIKNNGGGAAMEKLSSIKSQTIYEIIDNSQGFYVCPVEPQNRSKMNIPFRIGNAKGDDALEKRFLDKALELNMLSLKGHRSVGGIRASLYNAVTIEDVQKLAAFMKKFLEMHQL

SEQ ID NO: 681 - protein, 370 aa, synthetic construct
MDAPRQVVNFGPGPAKLPHSVLLEIQKELLDYKGVGISVLEMSHRSSDFAKIINNTENLVRVLLAVPDNYKVIFLQGGGCGQFSAVPLNLIGLKAGRCADYVVTGAWSAKAAEEAKKFGTINIVHPKLGSYTKIPDPSTWNLNPDASYVYYCANETVHGVEFDFIPDVKGAVLVCDMSSNFLSKPVDVSKFGVIFAGAQKNVGSAGVTVVIVRDDLLGFALRECPSVLEYKVQAGNSSLYNTPPCFSIYVMGLVLEWIKNNGGAAAMEKLSSIKSQTIYEIIDNSQGFYVCPVEPQNRSKMNIPFRIGNAKGDDALEKRFLDKALELNMLSLKGHRSVGGIRASLYNAVTIEDVQKLAAFMKKFLEMHQL

SEQ ID NO: 682 - protein, 370 aa, synthetic construct
MDAPRQVVNFGPGPAKLPHSVLLEIQKELLDYKGVGISVLEMSHRSSDFAKIINNTENLVRELLAVPDNYKVIFLQGGGCGQFSAVPLNLIGLKAGRCADYVVTGAWSAKAAEEAKKFGTINIVHPKLGSYTKIPDPSTWNLNPDASYVYYCANETVHGVQFDFIPDVKGAVLVCDMSSNFLSKPVDVSKFGVIFAGAQKNVGSAGVTVVIVRDDLLGFALRECPSVLEYKVQAGNSSLYNTPPCFSIYVMGLVLEWIKNNGGAAAMEKLSSIKSQTIYEIIDNSQGFYVCPVEPQNRSKMNIPFRIGNAKGDDALEKRFLDKALELNMLSLKGHRSVGGIRASLYNAVTIEDVQKLAAFMKKFLEMHQL

SEQ ID NO: 683 - protein, 370 aa, synthetic construct
MDAPRQVVNFGPGPAKLPHSVLLEIQKELLDYKGVGISVLEMSHRSSDFAKIINNTENLVRELLAVPDNYKVIFLQGGGCGQFSAVPLNLIGLKAGRCADYVVTGAWSAKAAEEAKKFGTINIVHPKLGSYTKIPDPSTWNLNPDASYVYYCANETVHGVEFDFIPDVKGAVLVCDMSSNFLSKPVDVSKFGVIFAGAQKNVGSAGVTVVIVRDDLLGFALRECPSVLEYKVQAGNSSLYNTPPCFSIYVMGLVLEWIKNNGGAAAMEKLSSIKSQTIYEIIDNSQGFYDCPVEPQNRSKMNIPFRIGNAKGDDALEKRFLDKALELNMLSLKGHRSVGGIRASLYNAVTIEDVQKLAAFMKKFLEMHQL

SEQ ID NO: 684 - protein, 370 aa, synthetic construct
MDAPRQVVNFGPGPAKLPHSVLLEIQKELLDYKGVGISVLEMSHRSSDFAKIINNTENLVRELLAVPDNYKVIFLQGGGCGQFSAVPLNLIGLKAGRCADYVVTGAWSAKAAEEAKKFGTINIVHPKLGSYTKIPDPSTWNLNPDASYVYYCANETVHGVEFDFIPDVKGAVLVCDMSSNFLCKPVDVSKFGVIFAGAQKNVGSAGVTVVIVRDDLLGFALRECPSVLEYKVQAGNSSLYNTPPCFSIYVMGLVLEWIKNNGGAAAMEKLSSIKSQTIYEIIDNSQGFYVCPVEPQNRSKMNIPFRIGNAKGDDALEKRFLDKALELNMLSLKGHRSVGGIRASLYNAVTIEDVQKLAAFMKKFLEMHQL

SEQ ID NO: 685 - protein, 370 aa, synthetic construct
MDAPRHVVNFGPGPAKLPHSVLLEIQKELLDYKGVGISVLEMSHRSSDFAKIINNTENLVRELLAVPDNYKVIFLQGGGCGQFSAVPLNLIGLKAGRCADYVVTGAWSAKAAEEAKKFGTINIVHPKLGSYTKIPDPSTWNLNPDASYVYYCANETVHGVEFDFIPDVKGAVLVCDMSSNFLSKPVDVSKFGVIFAGAQKNVGSAGVTVVIVRDDLLGFALRECPSVLEYKVQAGNSSLYNTPPCFSIYVMGLVLEWIKNNGGAAAMEKLSSIKSQTIYEIIDNSQGFYVCPVEPQNRSKMNIPFRIGNAKGDDALEKRFLDKALELNMLSLKGHRSVGGIRASLYNAVTIEDVQKLAAFMKKFLEMHQL

SEQ ID NO: 686 - protein, 370 aa, synthetic construct
MDAPRQVVNFGPGPAKLPHSVLLEIQKELLDYKGVGISVLEMSHRSSDFAKIINNTENLVRELLAVPDNYKVIFLQGGGCGQFSAVPLNLIGLKAGRCADYVVTGAWSAKAAEEAKKFGTINIVHPKLGSYTKIPDPSTWNLNPDASYVYYCANETVHGVEFDFIPYVKGAVLVCDMSSNFLSKPVDVSKFGVIFAGAQKNVGSAGVTVVIVRDDLLGFALRECPSVLEYKVQAGNSSLYNTPPCFSIYVMGLVLEWIKNNGGAAAMEKLSSIKSQTIYEIIDNSQGFYVCPVEPQNRSKMNIPFRIGNAKGDDALEKRFLDKALELNMLSLKGHRSVGGIRASLYNAVTIEDVQKLAAFMKKFLEMHQL

SEQ ID NO: 687 - protein, 370 aa, synthetic construct
MDAPRQVVNFGPGPAKLPLSVLLEIQKELLDYKGVGISVLEMSHRSSDFAKIINNTENLVRELLAVPDNYKVIFLQGGGCGQFSAVPLNLIGLKAGRCADYVVTGAWSAKAAEEAKKFGTINIVHPKLGSYTKIPDPSTWNLNPDASYVYYCANETVHGVEFDFIPDVKGAVLVCDMSSNFLSKPVDVSKFGVIFAGAQKNVGSAGVTVVIVRDDLLGFALRECPSVLEYKVQAGNSSLYNTPPCFSIYVMGLVLEWIKNNGGAAAMEKLSSIKSQTIYEIIDNSQGFYVCPVEPQNRSKMNIPFRIGNAKGDDALEKRFLDKALELNMLSLKGHRSVGGIRASLYNAVTIEDVQKLAAFMKKFLEMHQL

SEQ ID NO: 688 - protein, 370 aa, synthetic construct
MDAPRQVVNFGPGPAKLPHSVLLEIQKELLDYKGVGISVLEMSHRSSDFAKIINNTENLVRELLAVPDNYKVIFLQGGGCGQFSAVPLNLIGLKAGRCADYVVTGAWSAKAAEEAKKFGTINIVHPKLGSYTKIPDPSTWNLNPDASYVYYCANETVHGVEFDFLPDVKGAVLVCDMSSNFLSKPVDVSKFGVIFAGAQKNVGSAGVTVVIVRDDLLGFALRECPSVLEYKVQAGNSSLYNTPPCFSIYVMGLVLEWIKNNGGAAAMEKLSSIKSQTIYEIIDNSQGFYVCPVEPQNRSKMNIPFRIGNAKGDDALEKRFLDKALELNMLSLKGHRSVGGIRASLYNAVTIEDVQKLAAFMKKFLEMHQL

SEQ ID NO: 689 - protein, 370 aa, synthetic construct
MDAPRQVVNFGPGPAKLPHSVLLEIQKELLDYKGVGISVLEMSHRSSDFAKIINNTENLVRELLAVPDNYKVIFLQGGGCGQFSAVPLNLIGLKAGRCADYVVTGAWSAKAAEEAKKFGTINIVHPKLGSYTKIPDPSTWNLNPDASYVYYCANETVHGVEFDFIPDVKGAVLVCDMSSNFLSKPVDVSKFGVIFAGAQKNVGSAGVTVVIVRDDLLGFALRECPSVLEYKVQAGNSSLYNTPPCFSIYVMGLVLEWIKNNGGAAAMEKLSSIKSQTIYEIIDNSQGFYVCPVEPQNRGKMNIPFRIGNAKGDDALEKRFLDKALELNMLSLKGHRSVGGIRASLYNAVTIEDVQKLAAFMKKFLEMHQL

SEQ ID NO: 690 - protein, 370 aa, synthetic construct
MDAPRQVVNFGPGPAKLPHPVLLEIQKELLDYKGVGISVLEMSHRSSDFAKIINNTENLVRELLAVPDNYKVIFLQGGGCGQFSAVPLNLIGLKAGRCADYVVTGAWSAKAAEEAKKFGTINIVHPKLGSYTKIPDPSTWNLNPDASYVYYCANETVHGVEFDFIPDVKGAVLVCDMSSNFLSKPVDVSKFGVIFAGAQKNVGSAGVTVVIVRDDLLGFALRECPSVLEYKVQAGNSSLYNTPPCFSIYVMGLVLEWIKNNGGAAAMEKLSSIKSQTIYEIIDNSQGFYVCPVEPQNRSKMNIPFRIGNAKGDDALEKRFLDKALELNMLSLKGHRSVGGIRASLYNAVTIEDVQKLAAFMKKFLEMHQL

SEQ ID NO: 691 - protein, 370 aa, synthetic construct
MDAPRQVVNFGPGPAKLPHSVLLEIQKELLDFKGVGISVLEMSHRSSDFAKIINNTENLVRELLAVPDNYKVIFLQGGGCGQFSAVPLNLIGLKAGRCADYVVTGAWSAKAAEEAKKFGTINIVHPKLGSYTKIPDPSTWNLNPDASYVYYCANETVHGVEFDFIPDVKGAVLVCDMSSNFLSKPVDVSKFGVIFAGAQKNVGSAGVTVVIVRDDLLGFALRECPSVLEYKVQAGNSSLYNTPPCFSIYVMGLVLEWIKNNGGAAAMEKLSSIKSQTIYEIIDNSQGFYVCPVEPQNRSKMNIPFRIGNAKGDDALEKRFLDKALELNMLSLKGHRSVGGIRASLYNAVTIEDVQKLAAFMKKFLEMHQL

SEQ ID NO: 692 - protein, 370 aa, synthetic construct
MDAPRQVVNFGPGPAKLPHSVLLEIQKELLDYKGVGISVLEMSHRSSDFAKIINNTENLVRELLAVPDNYKVIFLQGGGCGQFSAVPLNLIGLKAGRWADYVVTGAWSAKAAEEAKKFGTINIVHPKLGSYTKIPDPSTWNLNPDASYVYYCANETVHGVEFDFIPDVKGAVLVCDMSSNFLSKPVDVSKFGVIFAGAQKNVGSAGVTVVIVRDDLLGFALRECPSVLEYKVQAGNSSLYNTPPCFSIYVMGLVLEWIKNNGGAAAMEKLSSIKSQTIYEIIDNSQGFYVCPVEPQNRSKMNIPFRIGNAKGDDALEKRFLDKALELNMLSLKGHRSVGGIRASLYNAVTIEDVQKLAAFMKKFLEMHQL

SEQ ID NO: 693 - protein, 370 aa, synthetic construct
MDAPRQVVNFGPGPAKLPHSVLLEIQKELLDYKGVGISVLEMSHRSSDFAKIINNTENLVRELLAVPDNYKVIFLQGGGCGQFSAVPLNLIGLKAGRCADYVVTGAWSAKAAEEAKKFGTINIVHPKLGSYTKIPDPSTWNLNPDASYVYYCANETVHGVEFDFIPDVKGAVLVSDMSSNFLSKPVDVSKFGVIFAGAQKNVGSAGVTVVIVRDDLLGFALRECPSVLEYKVQAGNSSLYNTPPCFSIYVMGLVLEWIKNNGGAAAMEKLSSIKSQTIYEIIDNSQGFYVCPVEPQNRSKMNIPFRIGNAKGDDALEKRFLDKALELNMLSLKGHRSVGGIRASLYNAVTIEDVQKLAAFMKKFLEMHQL

SEQ ID NO: 694 - protein, 370 aa, synthetic construct
MDAPRQVVNFGPGPAKLPHSVLLEIQKELLDYKGVGISVLEMSHRSSDFAKIINNTENLVRELLAVPDNYKVIFLQGGGCGQFSAVPLNLIGLKAGRCADYVVTGAWSAKAAEEAKKFGTINIVHPKLGSYTKIPDPSTWNLNPDASYVYYCTNETVHGVEFDFIPDVKGAVLVCDMSSNFLSKPVDVSKFGVIFAGAQKNVGSAGVTVVIVRDDLLGFALRECPSVLEYKVQAGNSSLYNTPPCFSIYVMGLVLEWIKNNGGAAAMEKLSSIKSQTIYEIIDNSQGFYVCPVEPQNRSKMNIPFRIGNAKGDDALEKRFLDKALELNMLSLKGHRSVGGIRASLYNAVTIEDVQKLAAFMKKFLEMHQL

SEQ ID NO: 695 - protein, 370 aa, synthetic construct
MDAPRQVVNFGPGPAKLPHSVLLEIQKELLDYKGVGISVLEMSHRSSDFAKIINNTENLVRELLAVPDNYKVIFLQGGGCGQFSAVPLNLIGLKAGRCADYVVTGAWSAKAAEEAKKFGTINIVHPKLGSYTKIPDPSTWNLNPDASYVYYCANETVHGVEFDFIPDVKGAVLVCDMSSNFLSKPVDVSKFGVIFAGAQKNVGSAGVTVVIVRDDLLGFALRECPSVLEYKVQAGNSSLYNTPPCFSIYVMGLVLEWSKNNGGAAAMEKLSSIKSQTIYEIIDNSQGFYVCPVEPQNRSKMNIPFRIGNAKGDDALEKRFLDKALELNMLSLKGHRSVGGIRASLYNAVTIEDVQKLAAFMKKFLEMHQL

SEQ ID NO: 696 - protein, 370 aa, synthetic construct
MDAPRQVVNFGPGPAKLPHSVLLEIQKELLDYKGVGISVLEMSHRSSDFAKIINNTENLVRELLAVPDNYKVIFLQGGGCGQFSAVPLNLIGLKAGRCADYVVTGAWSAKAAEEAKKFGTINIVHPKLGSYTKIPDPSTWNLNPDASYVYYCANETVHGVGFDFIPDVKGAVLVCDMSSNFLSKPVDVSKFGVIFAGAQKNVGSAGVTVVIVRDDLLGFALRECPSVLEYKVQAGNSSLYNTPPCFSIYVMGLVLEWIKNNGGAAAMEKLSSIKSQTIYEIIDNSQGFYVCPVEPQNRSKMNIPFRIGNAKGDDALEKRFLDKALELNMLSLKGHRSVGGIRASLYNAVTIEDVQKLAAFMKKFLEMHQL

SEQ ID NO: 697 - protein, 370 aa, synthetic construct
MDAPRQVVNFGPGPAKLPHSVLLEIQKELLDYKGVGISVLEMSHRSSDFAKIINNTENLVRELLAVPDNYKVIFLQGGGCGQFSAVPLNLIGLKAGRCADYVVTGAWSAKAAEEAKKFGTINIVHPKLGSYTKIPDRSTWNLNPDASYVYYCANETVHGVEFDFIPDVKGAVLVCDMSSNFLSKPVDVSKFGVIFAGAQKNVGSAGVTVVIVRDDLLGFALRECPSVLEYKVQAGNSSLYNTPPCFSIYVMGLVLEWIKNNGGAAAMEKLSSIKSQTIYEIIDNSQGFYVCPVEPQNRSKMNIPFRIGNAKGDDALEKRFLDKALELNMLSLKGHRSVGGIRASLYNAVTIEDVQKLAAFMKKFLEMHQL

SEQ ID NO: 698 - protein, 370 aa, synthetic construct
MDAPRQVVNFGPGPAKLPHSVLLEIQKELLDYKGVGISVLEMSHRSSDFAKIINNTENLVRELLAVPDNYKVIFLQGGGCGQFSAVPLNLIGLKAGRCADYVVTGAWSAKAAEEAKKFGTINIVHPKLGSYTKIPDPSTWNLNPDASYVYYCANETVHGVEFDFIPDVKGAVLVCDMSSNFLSKPVDVSKFGVIFAGAQKNVGSAGVTVVIVRDDLLGFALRECPSVLEYKVQAGNSSLYNTPPCFSIYVMGLVLEWIKNNGGAAAMEKLSSIKSQTIYEIIDYSQGFYVCPVEPQNRSKMNIPFRIGNAKGDDALEKRFLDKALELNMLSLKGHRSVGGIRASLYNAVTIEDVQKLAAFMKKFLEMHQL

SEQ ID NO: 699 - protein, 370 aa, synthetic construct
MDAPRQVVNFGPGPAKLPHSVLLEIQKELLDYKGVGISVLEMSHRSSDFAKIINNTENLVRELLAVPDNYKVIFLQGGGCGQFSAVPLNLIGLKAGRCADYVVTGAWSAKAAEEAKKFGTINIVHPKLGSYTKIPDPSTWNLNPDASYVYYCANETVHGVEFDFIPDVKGAVLVCDMSSNFLSKPVDVSKFGVIFAGAQKNVGSAGVTVVIVRDDMLGFALRECPSVLEYKVQAGNSSLYNTPPCFSIYVMGLVLEWIKNNGGAAAMEKLSSIKSQTIYEIIDNSQGFYVCPVEPQNRSKMNIPFRIGNAKGDDALEKRFLDKALELNMLSLKGHRSVGGIRASLYNAVTIEDVQKLAAFMKKFLEMHQL

SEQ ID NO: 700 - protein, 370 aa, synthetic construct
MDAPRQVVNFGPGPAKLPHSVLLEIQKELLDYKGVGISVLEMSHRSSDFAKIINNTENLVRELLAVPDNYKVIFLQGGGCGQFSAVPLNLIGLKAGRCADYVVTGAWSAKAAEEAKKFGTINIVHPKLGSYTKIPDPSTWNLNPDASYVYYCANETVHGVEFDFIPDVKGAVLVCDMSSNFLSKPVAVSKFGVIFAGAQKNVGSAGVTVVIVRDDLLGFALRECPSVLEYKVQAGNSSLYNTPPCFSIYVMGLVLEWIKNNGGAAAMEKLSSIKSQTIYEIIDNSQGFYVCPVEPQNRSKMNIPFRIGNAKGDDALEKRFLDKALELNMLSLKGHRSVGGIRASLYNAVTIEDVQKLAAFMKKFLEMHQL

SEQ ID NO: 701 - protein, 370 aa, synthetic construct
MDAPRQVVNFGPGPAKLPHSVLLEIQKELLDYKGVGISVLEMSHRSSDFAKIINNTENLVRELLAVPDNYKVIFLQGGGCGQFSAVPLNLIGLKAGRCADYVVTGAWSAKAAEEAKKFGTINIVHPKLGSYTKIPDPSTWNLNPDASYVYYCANETVHGVEFDFIPDVKGAVLVCDMSSNFLSKPVDVSKFGVIFAGAQKNVGSAGVTVVIVRDDLLGFALRECPSVLEYKVQAGNSSLYNTPPCFSIYVMGLVLEWIKNNGGAAAMEKLSSIKSQTIYEIIDNSQGFYVCPVEPQNRSKMNIPFRIGNAKGDDALEKRFLDKALELNMLSLKGHRSVGGIRSSLYNAVTIEDVQKLAAFMKKFLEMHQL

SEQ ID NO: 702 - protein, 370 aa, synthetic construct
MDAPRQVVNFGPGPAKLPHSVLLEIQKELLDYKGVGISVLEMSHRSSDFAKIINNTENLVRELLAVPDNYKVIFLQGGGCGQFSAVPLNLIGLKAGRCADYVVTGAWSAKAAEEAKKFGTINIVHPKLGSYTKIPDPSTWNLNPDASYVYYCANETVHGVEFDFIPDVKGAVLVCDMSSNFLSKPVDVSKFGVIFAGAQKNVGSAGVTVVIVRDDLLGFALRECPSVLEYKVQAGNSSLYNTPPCFSIYVMGLVLEWIKNNGGAAAMEKLSSIKSQTINEIIDNSQGFYVCPVEPQNRSKMNIPFRIGNAKGDDALEKRFLDKALELNMLSLKGHRSVGGIRASLYNAVTIEDVQKLAAFMKKFLEMHQL

SEQ ID NO: 703 - protein, 370 aa, synthetic construct
MDAPRQVVNFGPGPAKLPHSVLLEIQKELLDYKGVGISVLEMSHRSSDFARIINNTENLVRELLAVPDNYKVIFLQGGGCGQFSAVPLNLIGLKAGRCADYVVTGAWSAKAAEEAKKFGTINIVHPKLGSYTKIPDPSTWNLNPDASYVYYCANETVHGVEFDFIPDVKGAVLVCDMSSNFLSKPVDVSKFGVIFAGAQKNVGSAGVTVVIVRDDLLGFALRECPSVLEYKVQAGNSSLYNTPPCFSIYVMGLVLEWIKNNGGAAAMEKLSSIKSQTIYEIIDNSQGFYVCPVEPQNRSKMNIPFRIGNAKGDDALEKRFLDKALELNMLSLKGHRSVGGIRASLYNAVTIEDVQKLAAFMKKFLEMHQL

SEQ ID NO: 704 - protein, 370 aa, synthetic construct
MDAPRQVVNFGPGPAKLPHSVLLEIQKELLDYKGVGISVLEMSHRSSDFAKIINNTENLVRELLAVPDNYKVIFLQGGGCGQFSAVPLNLIGLKAGRCADYVVTGAWSAKAAEEAKKFGTINFVHPKLGSYTKIPDPSTWNLNPDASYVYYCANETVHGVEFDFIPDVKGAVLVCDMSSNFLSKPVDVSKFGVIFAGAQKNVGSAGVTVVIVRDDLLGFALRECPSVLEYKVQAGNSSLYNTPPCFSIYVMGLVLEWIKNNGGAAAMEKLSSIKSQTIYEIIDNSQGFYVCPVEPQNRSKMNIPFRIGNAKGDDALEKRFLDKALELNMLSLKGHRSVGGIRASLYNAVTIEDVQKLAAFMKKFLEMHQL

SEQ ID NO: 705 - protein, 370 aa, synthetic construct
MDAPRQVVNFGPGPAKLPHSALLEIQKELLDYKGVGISVLEMSHRSSDFAKIINNTENLVRELLAVPDNYKVIFLQGGGCGQFSAVPLNLIGLKAGRCADYVVTGAWSAKAAEEAKKFGTINIVHPKLGSYTKIPDPSTWNLNPDASYVYYCANETVHGVEFDFIPDVKGAVLVCDMSSNFLSKPVDVSKFGVIFAGAQKNVGSAGVTVVIVRDDLLGFALRECPSVLEYKVQAGNSSLYNTPPCFSIYVMGLVLEWIKNNGGAAAMEKLSSIKSQTIYEIIDNSQGFYVCPVEPQNRSKMNIPFRIGNAKGDDALEKRFLDKALELNMLSLKGHRSVGGIRASLYNAVTIEDVQKLAAFMKKFLEMHQL

SEQ ID NO: 706 - protein, 370 aa, synthetic construct
MDAPRQVVNFGPGPAKLPHSVLLEIQKELLDYKGVGISVLEMSHRSSDFAKIINNTENLVRELLAVPDNYKVIFLQGGGCGQFSAVPLNLIGLKAGRCADYVVTGAWSAKAAEEAKKFGTINIVHPKLGTYTKIPDPSTWNLNPDASYVYYCANETVHGVEFDFIPDVKGAVLVCDMSSNFLSKPVDVSKFGVIFAGAQKNVGSAGVTVVIVRDDLLGFALRECPSVLEYKVQAGNSSLYNTPPCFSIYVMGLVLEWIKNNGGAAAMEKLSSIKSQTIYEIIDNSQGFYVCPVEPQNRSKMNIPFRIGNAKGDDALEKRFLDKALELNMLSLKGHRSVGGIRASLYNAVTIEDVQKLAAFMKKFLEMHQL

SEQ ID NO: 707 - protein, 370 aa, synthetic construct
MDAPRQVVNFGPGPAKLPHSVLLEIQKELLDYKGVCISVLEMSHRSSDFAKIINNTENLVRELLAVPDNYKVIFLQGGGCGQFSAVPLNLIGLKAGRCADYVVTGAWSAKAAEEAKKFGTINIVHPKLGSYTKIPDPSTWNLNPDASYVYYCANETVHGVEFDFIPDVKGAVLVCDMSSNFLSKPVDVSKFGVIFAGAQKNVGSAGVTVVIVRDDLLGFALRECPSVLEYKVQAGNSSLYNTPPCFSIYVMGLVLEWIKNNGGAAAMEKLSSIKSQTIYEIIDNSQGFYVCPVEPQNRSKMNIPFRIGNAKGDDALEKRFLDKALELNMLSLKGHRSVGGIRASLYNAVTIEDVQKLAAFMKKFLEMHQL

SEQ ID NO: 708 - protein, 370 aa, synthetic construct
MDAPRQVVNFGPGPAKLPHSVLLEIQKELLDYKGVGISVLEMSHRSSDFAKIINNTENLVRELLAVPDNYKVIFLQGGGCGQFSAVPLNLIGLKAGRCADYVVTGAWSAKAAEEAKKFGTINIVHPKLGSYTKIPDPSTWNLNPDASYVYYCANETVHGVEFDFIPDVKGAVLVCDMSSNFLSKPVDVSKFGVIFAGAQKNVGSAGVTVVIVRDDLLGFALRECPSVLEYKVQAGNSSLYNTPPCFSIYVMGLVLEWIKNNGGAAAMEKLSSIKSQTIYEIIDNSQGFYVCPVEPQNRSKMNIPFRIDNAKGDDALEKRFLDKALELNMLSLKGHRSVGGIRASLYNAVTIEDVQKLAAFMKKFLEMHQL

SEQ ID NO: 709 - protein, 370 aa, synthetic construct
MDAPRQVVNFGPGPAKLPHSVLLEIQKELLDYKGVGISVLEMSHRSSDFAKIINNTENLVRELLAVPDNYKVIFLQGGGCGQFSAVPLNLIGLKAGRCADYVVTGAWSAKAAEEAKKFGTINIVHPKLGSYTKIPDPSTWNLNPDASYVYYCANETVHGVEFDFIPDVKGAVLVCDMSSNFLSKPVDFSKFGVIFAGAQKNVGSAGVTVVIVRDDLLGFALRECPSVLEYKVQAGNSSLYNTPPCFSIYVMGLVLEWIKNNGGAAAMEKLSSIKSQTIYEIIDNSQGFYVCPVEPQNRSKMNIPFRIGNAKGDDALEKRFLDKALELNMLSLKGHRSVGGIRASLYNAVTIEDVQKLAAFMKKFLEMHQL

SEQ ID NO: 710 - protein, 370 aa, synthetic construct
MDAPRQVVNFGPGPAKLPHSVLLEIQKELLDYKGVGISVLEMSHRSSDFAKIINNTENLVRELLAVPDNYKVIFLQGGGCGQFSAVPLNLIGLKAGRCADYVVTGAWSAKAAEEAKKFGTINIVHRKLGSYTKIPDPSTWNLNPDASYVYYCANETVHGVEFDFIPDVKGAVLVCDMSSNFLSKPVDVSKFGVIFAGAQKNVGSAGVTVVIVRDDLLGFALRECPSVLEYKVQAGNSSLYNTPPCFSIYVMGLVLEWIKNNGGAAAMEKLSSIKSQTIYEIIDNSQGFYVCPVEPQNRSKMNIPFRIGNAKGDDALEKRFLDKALELNMLSLKGHRSVGGIRASLYNAVTIEDVQKLAAFMKKFLEMHQL

SEQ ID NO: 711 - protein, 370 aa, synthetic construct
MDAPRQVVNFGPGPAKLPHSVLLEIQKELLDYKGVGISVLEMSHRSSDFAKIINNTENLVRELLAVPDNYKVIFLQGGGCGQFSAVPLNLIGLKAGRCADYVVTGAWSAKAAEEAKKFGTINIVHPKLGSYTKIPDPSTWNLNPDASYVYYCANETVHGVEFDFIPDVKGAVLVCDMSSNFLSKPVDVSKFGVIFAGAQKNVGSAGVTVVIVRDVLLGFALRECPSVLEYKVQAGNSSLYNTPPCFSIYVMGLVLEWIKNNGGAAAMEKLSSIKSQTIYEIIDNSQGFYVCPVEPQNRSKMNIPFRIGNAKGDDALEKRFLDKALELNMLSLKGHRSVGGIRASLYNAVTIEDVQKLAAFMKKFLEMHQL

SEQ ID NO: 712 - protein, 370 aa, synthetic construct
MDAPRQVVNFGPGPAKLPHSVLLEIQKELLDYRGVGISVLEMSHRSSDFAKIINNTENLVRELLAVPDNYKVIFLQGGGCGQFSAVPLNLIGLKAGRCADYVVTGAWSAKAAEEAKKFGTINIVHPKLGSYTKIPDPSTWNLNPDASYVYYCANETVHGVEFDFIPDVKGAVLVCDMSSNFLSKPVDVSKFGVIFAGAQKNVGSAGVTVVIVRDDLLGFALRECPSVLEYKVQAGNSSLYNTPPCFSIYVMGLVLEWIKNNGGAAAMEKLSSIKSQTIYEIIDNSQGFYVCPVEPQNRSKMNIPFRIGNAKGDDALEKRFLDKALELNMLSLKGHRSVGGIRASLYNAVTIEDVQKLAAFMKKFLEMHQL

SEQ ID NO: 713 - protein, 370 aa, synthetic construct
MDAPRQVVNFGPGPAKLPHSVLLEIQKELLDYKGVGISVLEMSHRSSDFAKIINNTENLVRELLAVPDNYKVIFLQGGGCGQFSAVPLNLIGLKAGRCADYVVTGAWSAKAAEEAKKFGTINIVHPKLGSYTKIPDPSTWNLNPDASYVYYCANETVHGVEFDFIPDVKGAVLVCDMSSNFLSKPVDVSKFGVIFAGAQKNVGSAGFTVVIVRDDLLGFALRECPSVLEYKVQAGNSSLYNTPPCFSIYVMGLVLEWIKNNGGAAAMEKLSSIKSQTIYEIIDNSQGFYVCPVEPQNRSKMNIPFRIGNAKGDDALEKRFLDKALELNMLSLKGHRSVGGIRASLYNAVTIEDVQKLAAFMKKFLEMHQL

SEQ ID NO: 714 - protein, 370 aa, synthetic construct
MDAPRQVVNFGPGPAKLPHSVLLEIQKELLDYKGVGISVLEMSHRSSDFAKIINNTENLVRELLAVPDNYKVIFLQGGGCGQFSAVPLNLIGLKAGRCAHYVVTGAWSAKAAEEAKKFGTINIVHPKLGSYTKIPDPSTWNLNPDASYVYYCANETVHGVEFDFIPDVKGAVLVCDMSSNFLSKPVDVSKFGVIFAGAQKNVGSAGVTVVIVRDDLLGFALRECPSVLEYKVQAGNSSLYNTPPCFSIYVMGLVLEWIKNNGGAAAMEKLSSIKSQTIYEIIDNSQGFYVCPVEPQNRSKMNIPFRIGNAKGDDALEKRFLDKALELNMLSLKGHRSVGGIRASLYNAVTIEDVQKLAAFMKKFLEMHQL

SEQ ID NO: 715 - protein, 370 aa, synthetic construct
MDAPRQVVNFGPGPAKLPHSVLLEIQKELLDYKGVGISVLEMSHRSSDFAKIINNTENLVRELLAVPDNYKVIFLQGGGCGQFSAVPLNLIGLKAGRCADYVVTGAWSAKAAEEAKKFGTINIVHPKLGSYTKIPDPSTWNLNPDASYVYYCANETVHGVEFDFIPDVKGAVLVCDMSSNFLYKPVDVSKFGVIFAGAQKNVGSAGVTVVIVRDDLLGFALRECPSVLEYKVQAGNSSLYNTPPCFSIYVMGLVLEWIKNNGGAAAMEKLSSIKSQTIYEIIDNSQGFYVCPVEPQNRSKMNIPFRIGNAKGDDALEKRFLDKALELNMLSLKGHRSVGGIRASLYNAVTIEDVQKLAAFMKKFLEMHQL

SEQ ID NO: 716 - protein, 370 aa, synthetic construct
MDAPRQVVNFGPGPAKLPHSVLLEIQKELLDYKGVGISVLEMSHRSSDFAKIINNTENLVRELLAVPDNYKVIFLQGGGCGQFSAVPLNLIGLKAGRCADYVVTGAWSAKAAEEAKKFGTINIVHPKLGSYTKIPDPSTWNLNPDASYVYYCANETVHGVEFDFIPDVKGAVLVCDMSSNFLSKPVDVSKFGVIFAGAQKNVGSAGVTVVIVRDDLLGFALRECPSVLEYKVQAGNSSLYNTPPCFSIYVMGLVLEWIKNNGGAAAMEKLSSIKSQTIYEIIDNSQGFYVCPVEPQNRSKMNIPFRIGNAKGDDALEKRFLDKALELSMLSLKGHRSVGGIRASLYNAVTIEDVQKLAAFMKKFLEMHQL

SEQ ID NO: 717 - protein, 370 aa, synthetic construct
MDAPRQVVNFGPGPAKLPHSVLLEIQKELLDYKGVGISVLEMSHRSSDFAKIINNTENLVRELLAVPDNYKVIFLQGGGCGQFSAVPLNLVGLKAGRCADYVVTGAWSAKAAEEAKKFGTINIVHPKLGSYTKIPDPSTWNLNPDASYVYYCANETVHGVEFDFIPDVKGAVLVCDMSSNFLSKPVDVSKFGVIFAGAQKNVGSAGVTVVIVRDDLLGFALRECPSVLEYKVQAGNSSLYNTPPCFSIYVMGLVLEWIKNNGGAAAMEKLSSIKSQTIYEIIDNSQGFYVCPVEPQNRSKMNIPFRIGNAKGDDALEKRFLDKALELNMLSLKGHRSVGGIRASLYNAVTIEDVQKLAAFMKKFLEMHQL

SEQ ID NO: 718 - protein, 370 aa, synthetic construct
MDAPRQVVNFGPGPAKLPHSVLLEIQKELLDYKGVGISVLEMSHRSSDFAKIINNTENLVRELLAVPDNYKVIFLQGGGCGQFSAVPLNLIGLKAGRCADYVVTGAWSAKAAEEAKKFGTINIVHPRLGSYTKIPDPSTWNLNPDASYVYYCANETVHGVEFDFIPDVKGAVLVCDMSSNFLSKPVDVSKFGVIFAGAQKNVGSAGVTVVIVRDDLLGFALRECPSVLEYKVQAGNSSLYNTPPCFSIYVMGLVLEWIKNNGGAAAMEKLSSIKSQTIYEIIDNSQGFYVCPVEPQNRSKMNIPFRIGNAKGDDALEKRFLDKALELNMLSLKGHRSVGGIRASLYNAVTIEDVQKLAAFMKKFLEMHQL

SEQ ID NO: 719 - protein, 370 aa, synthetic construct
MDAPRQVVNFGPGPAKLPHSVLLEIQKELLDYKGVGISVLEMSHRSSDFAKIINNTENLVRELLAVPDNYKVIFLQGGGCGQFSAVPLNLIGLKAGRCADYVVTGAWSAKAAEEAKKFGTINIVHPKLGSYTKIPDPSTWNLNPDASYVYYCANETVHGVEFDFIPDVKGAVLVCDMSSNFLSKPVDVSKFGVIFAGAQKNVGSAGVTVVIVRDDLRGFALRECPSVLEYKVQAGNSSLYNTPPCFSIYVMGLVLEWIKNNGGAAAMEKLSSIKSQTIYEIIDNSQGFYVCPVEPQNRSKMNIPFRIGNAKGDDALEKRFLDKALELNMLSLKGHRSVGGIRASLYNAVTIEDVQKLAAFMKKFLEMHQL

SEQ ID NO: 720 - protein, 370 aa, synthetic construct
MDAPRQVVNFGPGPAKLPHSVLLEIQKELLDYKGVGISVLEMSHRSSDFAKIINNTENLVRELLAVPDNYKVIFLQGGGCGQFSAVPLNLFGLKAGRCADYVVTGAWSAKAAEEAKKFGTINIVHPKLGSYTKIPDPSTWNLNPDASYVYYCANETVHGVEFDFIPDVKGAVLVCDMSSNFLSKPVDVSKFGVIFAGAQKNVGSAGVTVVIVRDDLLGFALRECPSVLEYKVQAGNSSLYNTPPCFSIYVMGLVLEWIKNNGGAAAMEKLSSIKSQTIYEIIDNSQGFYVCPVEPQNRSKMNIPFRIGNAKGDDALEKRFLDKALELNMLSLKGHRSVGGIRASLYNAVTIEDVQKLAAFMKKFLEMHQL

SEQ ID NO: 721 - protein, 370 aa, synthetic construct
MDAPRQVVNFGPGPAKLPHSVLLEIQKELLDYKGVGISVLEMSHRSSDFAKIINNTENLVRELLAVPDNYKVIFLQGGGCGQFSAVPLNLIGLKAGRCADYVVTGAWSAKAAEEAKKFGTINIVHPKLGSYTKIPDPSTWNLKPDASYVYYCANETVHGVEFDFIPDVKGAVLVCDMSSNFLSKPVDVSKFGVIFAGAQKNVGSAGVTVVIVRDDLLGFALRECPSVLEYKVQAGNSSLYNTPPCFSIYVMGLVLEWIKNNGGAAAMEKLSSIKSQTIYEIIDNSQGFYVCPVEPQNRSKMNIPFRIGNAKGDDALEKRFLDKALELNMLSLKGHRSVGGIRASLYNAVTIEDVQKLAAFMKKFLEMHQL

SEQ ID NO: 722 - protein, 370 aa, synthetic construct
MDAPRQVVNFGPGPAKLPHSVLLEIQKELLDYKGVGISVLEMSHRSSDFAKIINNTENLVRELLAVPDNYKVIFLQGGGCGQFSAVPLNLIGLKAGRCADYVVTGAWSAKAAEEAKKFGTINIVHPKLGSYTKIPDPSTWNLNPDASYVYYCANETVHGVEFDFIPDVKGAVLVCDMSSNFLSKPVDVSKFGVIFAGAQKKVGSAGVTVVIVRDDLLGFALRECPSVLEYKVQAGNSSLYNTPPCFSIYVMGLVLEWIKNNGGAAAMEKLSSIKSQTIYEIIDNSQGFYVCPVEPQNRSKMNIPFRIGNAKGDDALEKRFLDKALELNMLSLKGHRSVGGIRASLYNAVTIEDVQKLAAFMKKFLEMHQL

SEQ ID NO: 723 - protein, 370 aa, synthetic construct
MDAPRQVVNFGPGPAKLPHSLLLEIQKELLDYKGVGISVLEMSHRSSDFAKIINNTENLVRELLAVPDNYKVIFLQGGGCGQFSAVPLNLIGLKAGRCADYVVTGAWSAKAAEEAKKFGTINIVHPKLGSYTKIPDPSTWNLNPDASYVYYCANETVHGVEFDFIPDVKGAVLVCDMSSNFLSKPVDVSKFGVIFAGAQKNVGSAGVTVVIVRDDLLGFALRECPSVLEYKVQAGNSSLYNTPPCFSIYVMGLVLEWIKNNGGAAAMEKLSSIKSQTIYEIIDNSQGFYVCPVEPQNRSKMNIPFRIGNAKGDDALEKRFLDKALELNMLSLKGHRSVGGIRASLYNAVTIEDVQKLAAFMKKFLEMHQL

SEQ ID NO: 724 - protein, 370 aa, synthetic construct
MDAPRQVVNFGPGPAKLPHSVLLEIQKELLDYKGVGISVLEMSHRSSDFAKIINNTENLVRELLAVPDNYKVIFLQGGGCGQFSAVPLNLIGLKAGRCADYVVTGAWSAKAAEEAKKFGTINIVHPKLGSYTKIPDPSTWNLNPDASYVYYCANETVHGVEFDFIPDVKGAVLVCDMSSNFLSKPVDVSKFGVIFAGAQKNVGSAGVTVVIVRDDLLGFALRECPSVLEYKVQAGNSSLYNTPPCFSIYVMGLVLEWIKNNGGAAAMEKLSSIKSQTIYEIIDNSQGFYVCPVEPQDRSKMNIPFRIGNAKGDDALEKRFLDKALELNMLSLKGHRSVGGIRASLYNAVTIEDVQKLAAFMKKFLEMHQL

SEQ ID NO: 725 - protein, 370 aa, synthetic construct
MDAPRQVVNFGPGPAKLPHSVLLEIQKELLDYKGVGISVLEMSHRSSDFAKIINNTENLVRELLAVPDNYKVIFLQGGGCGQFSAVPLNLIGLKAGRCADYVVTGAWSAKAAEEAKKFGTINIVHPKLGSYTKIPDPSTWNLNPDASYVYYCANETVHGVEFDFIPDVKGAVLVCDMSSNFLSKPVDVSKFGVIFAGAQKNVGSAGVTVVIVRDDLLGFALRECPSVLEYKVQAGNSSLYNTPPCFSIYVMGLVLEWIKNNRGAAAMEKLSSIKSQTIYEIIDNSQGFYVCPVEPQNRSKMNIPFRIGNAKGDDALEKRFLDKALELNMLSLKGHRSVGGIRASLYNAVTIEDVQKLAAFMKKFLEMHQL

SEQ ID NO: 726 - protein, 370 aa, synthetic construct
MDAPRQVVNFGPGPAKLPHSVLLEIQKELLDYKGVGISVLEMSHRSSDFAKIINNTENLVRELLAVPDNYKVIFLQGGGCGQFSAVPLNLIGLKAGRCADYVVTGAWSAKAAEEAKKFGTINIVHPKLGSYTKIPDPSTWNLNPDASYVYYCANETVHGVEFDFIPDVKGAVLVCDMSSNFLSKPVDVSKFGVIFAGAQKNVGSAGVTVVIVRDDLLGFALRECPSVLEYKVQAGNSSLYNTPPCFSIYVMGLVLEWIKNNGGAAAMEKLSSIKSQTIYEIIDNSQGFYVCPVEPQNRSKMNIPFRIGNAKVDDALEKRFLDKALELNMLSLKGHRSVGGIRASLYNAVTIEDVQKLAAFMKKFLEMHQL

SEQ ID NO: 727 - protein, 370 aa, synthetic construct
MDAPRQVVNFGPGPAKLPHSVLLEIQKELLDYKGVGISVLEMSHRSSDFAKIINNTENLVRELLAVPDNYKVIFLQGGGCGQFSAVPLNLIGLKAGRCADYVVTGAWSAKAAEEAKKFGTINIVHPKLGSYTKITDPSTWNLNPDASYVYYCANETVHGVEFDFIPDVKGAVLVCDMSSNFLSKPVDVSKFGVIFAGAQKNVGSAGVTVVIVRDDLLGFALRECPSVLEYKVQAGNSSLYNTPPCFSIYVMGLVLEWIKNNGGAAAMEKLSSIKSQTIYEIIDNSQGFYVCPVEPQNRSKMNIPFRIGNAKGDDALEKRFLDKALELNMLSLKGHRSVGGIRASLYNAVTIEDVQKLAAFMKKFLEMHQL

SEQ ID NO: 728 - protein, 370 aa, synthetic construct
MDAPRQVVNFGPGPAKLPHSVLLEIQKELLDYKGVGISVLEMSHRSSDFAKIINNTENLVRELLAVPDDYKVIFLQGGGCGQFSAVPLNLIGLKAGRCADYVVTGAWSAKAAEEAKKFGTINIVHPKLGSYTKIPDPSTWNLNPDASYVYYCANETVHGVEFDFIPDVKGAVLVCDMSSNFLSKPVDVSKFGVIFAGAQKNVGSAGVTVVIVRDDLLGFALRECPSVLEYKVQAGNSSLYNTPPCFSIYVMGLVLEWIKNNGGAAAMEKLSSIKSQTIYEIIDNSQGFYVCPVEPQNRSKMNIPFRIGNAKGDDALEKRFLDKALELNMLSLKGHRSVGGIRASLYNAVTIEDVQKLAAFMKKFLEMHQL

SEQ ID NO: 729 - protein, 370 aa, synthetic construct
MDAPRQVVNFGPGPAKLPHSVLLEIQKELLDYKGVGISVLEMSHRSSDFAKIINITENLVRELLAVPDNYKVIFLQGGGCGQFSAVPLNLIGLKAGRCADYVVTGAWSAKAAEEAKKFGTINIVHPKLGSYTKIPDPSTWNLNPDASYVYYCANETVHGVEFDFIPDVKGAVLVCDMSSNFLSKPVDVSKFGVIFAGAQKNVGSAGVTVVIVRDDLLGFALRECPSVLEYKVQAGNSSLYNTPPCFSIYVMGLVLEWIKNNGGAAAMEKLSSIKSQTIYEIIDNSQGFYVCPVEPQNRSKMNIPFRIGNAKGDDALEKRFLDKALELNMLSLKGHRSVGGIRASLYNAVTIEDVQKLAAFMKKFLEMHQL

SEQ ID NO: 730 - protein, 370 aa, synthetic construct
MDAPRQVVNFGPGPAKLPHSVLLEIQKELLDYKGVGISVLEMSHRSSDFAKIINNTENLARELLAVPDNYKVIFLQGGGCGQFSAVPLNLIGLKAGRCADYVVTGAWSAKAAEEAKKFGTINIVHPKLGSYTKIPDPSTWNLNPDASYVYYCANETVHGVEFDFIPDVKGAVLVCDMSSNFLSKPVDVSKFGVIFAGAQKNVGSAGVTVVIVRDDLLGFALRECPSVLEYKVQAGNSSLYNTPPCFSIYVMGLVLEWIKNNGGAAAMEKLSSIKSQTIYEIIDNSQGFYVCPVEPQNRSKMNIPFRIGNAKGDDALEKRFLDKALELNMLSLKGHRSVGGIRASLYNAVTIEDVQKLAAFMKKFLEMHQL

SEQ ID NO: 731 - protein, 370 aa, synthetic construct
MDAPRQVVNFGPGPAKLPHSVLLEIQKELLDYKGVGISVLEMSHRSSDFAKIINNTENLVRELLAVPDYYKVIFLQGGGCGQFSAVPLNLIGLKAGRCADYVVTGAWSAKAAEEAKKFGTINIVHPKLGSYTKIPDPSTWNLNPDASYVYYCANETVHGVEFDFIPDVKGAVLVCDMSSNFLSKPVDVSKFGVIFAGAQKNVGSAGVTVVIVRDDLLGFALRECPSVLEYKVQAGNSSLYNTPPCFSIYVMGLVLEWIKNNGGAAAMEKLSSIKSQTIYEIIDNSQGFYVCPVEPQNRSKMNIPFRIGNAKGDDALEKRFLDKALELNMLSLKGHRSVGGIRASLYNAVTIEDVQKLAAFMKKFLEMHQL

SEQ ID NO: 732 - protein, 370 aa, synthetic construct
MDAPRQVVNFGPGPAKLPHSVLLEIQKELLDYKGVGISVLEMSHRSSDFAKIINNTENLVRELLAVPDNYKVIFLQGGGCGQFSAVPLNLIGLKAGRCADYVVTGAWSAKAAEEAKKFGTINIVHPKLGSYTKIPDPSTWNLNPDASYVYYCANETVHGVEFDFIPDVKGAVLVCDMSSNFLSKPVDVSKFGVIFAGAQKNVGSAGVTVVIVRDDLLGFALRECPSVLEYKVQAGNSSLYNTPPCFSIYDMGLVLEWIKNNGGAAAMEKLSSIKSQTIYEIIDNSQGFYVCPVEPQNRSKMNIPFRIGNAKGDDALEKRFLDKALELNMLSLKGHRSVGGIRASLYNAVTIEDVQKLAAFMKKFLEMHQL

SEQ ID NO: 733 - protein, 370 aa, synthetic construct
MDAPRQVVNFGPGPAKLPHSVLLEIQKELLDYKGVGISVLEMSHRSSDFAKIINNTENLVRELLAVPDNYKVIFLQGGGCGQFSAVPLNLIGLKAGRCADYVVTGAWSAKAAEEAKKFGTINIVHPKLGSYTKIPDPSTWNLNPDASYVYYCANETVHGVEFDFRPDVKGAVLVCDMSSNFLSKPVDVSKFGVIFAGAQKNVGSAGVTVVIVRDDLLGFALRECPSVLEYKVQAGNSSLYNTPPCFSIYVMGLVLEWIKNNGGAAAMEKLSSIKSQTIYEIIDNSQGFYVCPVEPQNRSKMNIPFRIGNAKGDDALEKRFLDKALELNMLSLKGHRSVGGIRASLYNAVTIEDVQKLAAFMKKFLEMHQL

SEQ ID NO: 734 - protein, 370 aa, synthetic construct
MDAPRQVVNFGPGPAKLPHSVLLEIQKELLDYKGVGISVLEMSHRSSDFAKIINNTENLVRELLAVPDNYKVIFLQGGGCGQFSAVPLNLIGLKAGRCADYVVTGAWSAKAAEEAKKFGTINIVHPKLGSYTKIPDPSTWNLNPDASYVYYCANETVHGVEFDFIPDVKGAVLVCDMSSNFLSKPVDVSKFGVIFAGAQKNVGSAGVTVVIVRDDLLGFALRECPSVLEYKVQAGNSSLYNTPPCFSIYVMGLVLEWIKNNGGAAAMEKLSSIKSQTIYEIIDNSQGFYVCPVEPQNRSTMNIPFRIGNAKGDDALEKRFLDKALELNMLSLKGHRSVGGIRASLYNAVTIEDVQKLAAFMKKFLEMHQL

SEQ ID NO: 735 - protein, 370 aa, synthetic construct
MDAPRQVVNFGPGPAKLPHSVLLEIQKELLDYKGVGISVLEMSHRSSDFAKIINNTENLVRELLAVPDNYKVIFLQGGGCGQFSAVPLNLIGLKAGRCADYVVTGAWSAKAAEEAKKFGTINIVHPKLGSYTKIPDPSTWNLNPDASYVYYCANETVHGVEFDFIPDVKGAVLVCDMSSNFLSKPVDVSKFGVIFAGAQKIVGSAGVTVVIVRDDLLGFALRECPSVLEYKVQAGNSSLYNTPPCFSIYVMGLVLEWIKNNGGAAAMEKLSSIKSQTIYEIIDNSQGFYVCPVEPQNRSKMNIPFRIGNAKGDDALEKRFLDKALELNMLSLKGHRSVGGIRASLYNAVTIEDVQKLAAFMKKFLEMHQL

SEQ ID NO: 736 - protein, 370 aa, synthetic construct
MDAPRQVVNFGPGPAKLPHSVLLEIQKELLDYKGVGISVLEMSHRSSDFAKIINNTENLVRELLAVPDNYKVIFLQGGGCGQFSAVPLNLIGLKAGRCADYVVTGAWSAKAAEEAKKFGTINIVHPKLGSYTKIPDPSTWNLNPDASYVYYCANETVHGVEFDFIPDVKGAVLVCDMSSNFLSKPVDVSKFGVIFAGAQKNVGSAGVTVVIVRDDLLGFALRECPSVLEYKVQAGNSSLYNTPPCFSIYVMGLVLEWIKNNGGAAAMEKLSSIKSQTIYEIIDNSQGFYVCPVEPQNRSKMNIPFRIGNAKGDDALEKRFLDNALELNMLSLKGHRSVGGIRASLYNAVTIEDVQKLAAFMKKFLEMHQL

SEQ ID NO: 737 - protein, 370 aa, synthetic construct
MDAPRQVVNFGPGPAKLPHSVLLEIQKELLDYKGVGISVLEMSHRSSDFAKINNNTENLVRELLAVPDNYKVIFLQGGGCGQFSAVPLNLIGLKAGRCADYVVTGAWSAKAAEEAKKFGTINIVHPKLGSYTKIPDPSTWNLNPDASYVYYCANETVHGVEFDFIPDVKGAVLVCDMSSNFLSKPVDVSKFGVIFAGAQKNVGSAGVTVVIVRDDLLGFALRECPSVLEYKVQAGNSSLYNTPPCFSIYVMGLVLEWIKNNGGAAAMEKLSSIKSQTIYEIIDNSQGFYVCPVEPQNRSKMNIPFRIGNAKGDDALEKRFLDKALELNMLSLKGHRSVGGIRASLYNAVTIEDVQKLAAFMKKFLEMHQL

SEQ ID NO: 738 - protein, 370 aa, synthetic construct
MDAPRQVVNFGPGPAKLPHTVLLEIQKELLDYKGVGISVLEMSHRSSDFAKIINNTENLVRELLAVPDNYKVIFLQGGGCGQFSAVPLNLIGLKAGRCADYVVTGAWSAKAAEEAKKFGTINIVHPKLGSYTKIPDPSTWNLNPDASYVYYCANETVHGVEFDFIPDVKGAVLVCDMSSNFLSKPVDVSKFGVIFAGAQKNVGSAGVTVVIVRDDLLGFALRECPSVLEYKVQAGNSSLYNTPPCFSIYVMGLVLEWIKNNGGAAAMEKLSSIKSQTIYEIIDNSQGFYVCPVEPQNRSKMNIPFRIGNAKGDDALEKRFLDKALELNMLSLKGHRSVGGIRASLYNAVTIEDVQKLAAFMKKFLEMHQL

SEQ ID NO: 739 - protein, 370 aa, synthetic construct
MDAPRQVVNFGPGPAKLPHSVLLEIQKELLDYKGVGISVLEMSHRSSDFAKIINNTENLVRELLAVPDNYKVIFLQGGGCGQFSAVPLNLIGLKAGRCADYVVTGAWSAKAAEEAKKFGTINIVHPKLGSYTKIPDPSTWNLNPDASYVYYCANETVHGVEFDFIPDVKGAVLVCDMSSNFLSKPVDVSKFGVIFAGAQKNVGSAGVTVVIVRDDLLGFALRECPSVLEYKVQAGNSSLYNTPPCFSIYVMGLVLEWIKNNGGAAAMEKLSSIKSLTIYEIIDNSQGFYVCPVEPQNRSKMNIPFRIGNAKGDDALEKRFLDKALELNMLSLKGHRSVGGIRASLYNAVTIEDVQKLAAFMKKFLEMHQL

SEQ ID NO: 740 - protein, 370 aa, synthetic construct
MDAPRQVVNFGPGPAKLPHSVLLEIQKELLDYKGVGISVLEMSHRSSDFAKIINNTENLVRELLAVPDNYKVIFLQGGGCGQFSAVPLNLIGLKAGRCADYVVTGAWSAKAAEEAKKFGTINIVHPKLGSYTKIPDPSTWNLNPDASYVYYCANETVHGVEFDFIPDVKGAVLVCDMSSNFLSKPVDVSQFGVIFAGAQKNVGSAGVTVVIVRDDLLGFALRECPSVLEYKVQAGNSSLYNTPPCFSIYVMGLVLEWIKNNGGAAAMEKLSSIKSQTIYEIIDNSQGFYVCPVEPQNRSKMNIPFRIGNAKGDDALEKRFLDKALELNMLSLKGHRSVGGIRASLYNAVTIEDVQKLAAFMKKFLEMHQL

SEQ ID NO: 741 - protein, 370 aa, synthetic construct
MDAPRQVVNFGPGPAKLPHSVLLEIQKELLDYKGVGISVLEMSHRSSDFAKIINNTENLVRELLAVPDNYKVIFLQGGGCGQFSAVPLNLIGLKAGRCADYVVTGAWSAKAAEEAKKFGTINIVHPKVGSYTKIPDPSTWNLNPDASYVYYCANETVHGVEFDFIPDVKGAVLVCDMSSNFLSKPVDVSKFGVIFAGAQKNVGSAGVTVVIVRDDLLGFALRECPSVLEYKVQAGNSSLYNTPPCFSIYVMGLVLEWIKNNGGAAAMEKLSSIKSQTIYEIIDNSQGFYVCPVEPQNRSKMNIPFRIGNAKGDDALEKRFLDKALELNMLSLKGHRSVGGIRASLYNAVTIEDVQKLAAFMKKFLEMHQL

SEQ ID NO: 742 - protein, 370 aa, synthetic construct
MDAPRQVVNFGPGPAKLPHSVLLEIQKELLDYKGVGISVLEMSHRSSDFAKIINNTENLVRELLAVPDNYKVIFLQGGGCGQFSAVPLNLIGLKAGRCADYVVTGAWSAKAAEEAKKFGTINIVHPKLGSYTKIPDPSTWNLNPDASYVYYCANETVHGVEFDFIPDVKGAVLVCDMSSNFLSKPVDVSKFGVIFAGAQKNVGCAGVTVVIVRDDLLGFALRECPSVLEYKVQAGNSSLYNTPPCFSIYVMGLVLEWIKNNGGAAAMEKLSSIKSQTIYEIIDNSQGFYVCPVEPQNRSKMNIPFRIGNAKGDDALEKRFLDKALELNMLSLKGHRSVGGIRASLYNAVTIEDVQKLAAFMKKFLEMHQL

SEQ ID NO: 743 - protein, 370 aa, synthetic construct
MDAPRQVVNFGPGPAKLPHSVLLEIQKELLDYKGVGISVLEMSHRSSDFAKIINNTENLVRELLAVPDNYKVIFLQGGGCGQFSAVPLNLIGLKAGRCADYVVTGAWSAKAAEEAKKFGTINIVHPKLGSYTKIPDPSTWNLNPDASYVYYCANETVHGVEFDFIPDVKGAVLVCDMSSNFLSKPVNVSKFGVIFAGAQKNVGSAGVTVVIVRDDLLGFALRECPSVLEYKVQAGNSSLYNTPPCFSIYVMGLVLEWIKNNGGAAAMEKLSSIKSQTIYEIIDNSQGFYVCPVEPQNRSKMNIPFRIGNAKGDDALEKRFLDKALELNMLSLKGHRSVGGIRASLYNAVTIEDVQKLAAFMKKFLEMHQL

SEQ ID NO: 744 - protein, 370 aa, synthetic construct
MDAPRQVVNFGPGPAKLPHSVLLEIQKELLDYKGVGISVLEMSHRSSDFAKIINNTENLVRELLAVPDNYKVIFLQGGGCGQLSAVPLNLIGLKAGRCADYVVTGAWSAKAAEEAKKFGTINIVHPKLGSYTKIPDPSTWNLNPDASYVYYCANETVHGVEFDFIPDVKGAVLVCDMSSNFLSKPVDVSKFGVIFAGAQKNVGSAGVTVVIVRDDLLGFALRECPSVLEYKVQAGNSSLYNTPPCFSIYVMGLVLEWIKNNGGAAAMEKLSSIKSQTIYEIIDNSQGFYVCPVEPQNRSKMNIPFRIGNAKGDDALEKRFLDKALELNMLSLKGHRSVGGIRASLYNAVTIEDVQKLAAFMKKFLEMHQL

SEQ ID NO: 745 - protein, 370 aa, synthetic construct
MDAPRQVVNFGPGPAKLPHSVLLEIQKELLDYKGVGISVLEMSHRSSDFAKIINNTENLVRELLAVPDNYKVIFLQGGGCGQFSAVPLNLIGLKAGRCADYVVTGAWSAKAAEEAKKFGTINIVHPKLGSYTKIPDPSTWNLNPDASYVYYCANETVHGVEFDFIPDVKGAVLVCDMSSNFLSKPVDVSKFGVIFAGAQKNVGSAGVTVVIVRDNLLGFALRECPSVLEYKVQAGNSSLYNTPPCFSIYVMGLVLEWIKNNGGAAAMEKLSSIKSQTIYEIIDNSQGFYVCPVEPQNRSKMNIPFRIGNAKGDDALEKRFLDKALELNMLSLKGHRSVGGIRASLYNAVTIEDVQKLAAFMKKFLEMHQL

SEQ ID NO: 746 - protein, 370 aa, synthetic construct
MDAPRQVVNFGPGPAKLPHSVLLEIQKELLDYKGVGISVLEMSHRSSDFAKIINNTENLVRELLAVPDNYKVIFLQGGGCGQFSAVPLNLIGLKAGRCADYVVTGAWSAKAAEEAKKFGTINIVHPKLGSYTKIPDPSTWNLNPDASYVYYCANETVHGVEFDFIPDVKGAVLVCDMSSNFLSKPVDVSKFGVIFAGAQKNVGSAGVTVVIVRDDLLGFALRECPSVLEYKVQAGNSSLYNTPPCFSIYVMGLVLEWIKNNGGAAAMEKLSSIKSQTIYEIIDNSQGFYVCPVEPQNRSKMNIPFRIGNAKGDDALEKRFLDKALELNMLSLKGHRSVGGIRASLYNAVTIENVQKLAAFMKKFLEMHQL

SEQ ID NO: 747 - protein, 370 aa, synthetic construct
MDAPRQVVNFGPGPAKLPQSVLLEIQKELLDYKGVGISVLEMSHRSSDFAKIINNTENLVRELLAVPDNYKVIFLQGGGCGQFSAVPLNLIGLKAGRCADYVVTGAWSAKAAEEAKKFGTINIVHPKLGSYTKIPDPSTWNLNPDASYVYYCANETVHGVEFDFIPDVKGAVLVCDMSSNFLSKPVDVSKFGVIFAGAQKNVGSAGVTVVIVRDDLLGFALRECPSVLEYKVQAGNSSLYNTPPCFSIYVMGLVLEWIKNNGGAAAMEKLSSIKSQTIYEIIDNSQGFYVCPVEPQNRSKMNIPFRIGNAKGDDALEKRFLDKALELNMLSLKGHRSVGGIRASLYNAVTIEDVQKLAAFMKKFLEMHQL

SEQ ID NO: 748 - protein, 370 aa, synthetic construct
MDAPRQVVNFGPGPAKLPHSVLLEIQKELLDYKGVGISVLEMSHRSSDFAKIINNTENLVRELLAVPDNYKVIFLQGGGCGQFSAVPLNLIGLKAGRCADYVVTGAWSAKAAEEAKKFATINIVHPKLGSYTKIPDPSTWNLNPDASYVYYCANETVHGVEFDFIPDVKGAVLVCDMSSNFLSKPVDVSKFGVIFAGAQKNVGSAGVTVVIVRDDLLGFALRECPSVLEYKVQAGNSSLYNTPPCFSIYVMGLVLEWIKNNGGAAAMEKLSSIKSQTIYEIIDNSQGFYVCPVEPQNRSKMNIPFRIGNAKGDDALEKRFLDKALELNMLSLKGHRSVGGIRASLYNAVTIEDVQKLAAFMKKFLEMHQL

SEQ ID NO: 749 - protein, 370 aa, synthetic construct
MDAPRQVVNFGPGPAKLPHSVLLEIQKELLDYKGVGISVLEMSHRSSDFAKIINNTDNLVRELLAVPDNYKVIFLQGGGCGQFSAVPLNLIGLKAGRCADYVVTGAWSAKAAEEAKKFGTINIVHPKLGSYTKIPDPSTWNLNPDASYVYYCANETVHGVEFDFIPDVKGAVLVCDMSSNFLSKPVDVSKFGVIFAGAQKNVGSAGVTVVIVRDDLLGFALRECPSVLEYKVQAGNSSLYNTPPCFSIYVMGLVLEWIKNNGGAAAMEKLSSIKSQTIYEIIDNSQGFYVCPVEPQNRSKMNIPFRIGNAKGDDALEKRFLDKALELNMLSLKGHRSVGGIRASLYNAVTIEDVQKLAAFMKKFLEMHQL

SEQ ID NO: 750 - protein, 370 aa, synthetic construct
MDAPRQVVNFGPGPAKLPHSVLLEIQKELLDYKGVGISVLEMSHRSSDFAKIINNTENLVRELLAVPDNYKVIFLQGGGCGQFSAVPLNLIGLKAGRCADYVVTGAWSAKAAEEAKKFGTINIVHPKLGSYTKIPDPSTWNLNPDASYVYYCANETVHGVEFDFIPDVKGAVLVCDMSSNFLSKPVDVSKFGVIFAGAQKNVGSAGVTVVIVRDDLLGFALRECPSVLEYKVQAGNSSLYNTPPCFSIYVMGLVLEWIKNNGGAAAMEKLSSIKSQTIYEIIDNSQGFYVCPVEPQNRSKMNIPFRIGNAKGDDALEKRFLDKALELNMLSLKEHRSVGGIRASLYNAVTIEDVQKLAAFMKKFLEMHQL

SEQ ID NO: 751 - protein, 370 aa, synthetic construct
MDAPRQVVNFGPGPAKLPHSVLLEIQKELLDYKGVGISVLEMSHRSSDFAKIINNTENLVRELLAVPDNYKVIFLQGGGCGQFSAVPLNLIGLKAGRCADYVVTGAWSAKAAEEAKKFGTINIVHPKLGSYTKIPDPSTWNLNPDASYVYYCANETVHGVEFDFIPDVKGAVLVCDMSSNFLSKPVDVSKFGVIFAGAQKNVGSAGVTVVIVRDDLLGFALRECPSVLEYKVQAGNSSLYNTPPCFSIYVMGLVLEWIKNNGGATAMEKLSSIKSQTIYEIIDNSQGFYVCPVEPQNRSKMNIPFRIGNAKGDDALEKRFLDKALELNMLSLKGHRSVGGIRASLYNAVTIEDVQKLAAFMKKFLEMHQL

SEQ ID NO: 752 - protein, 370 aa, synthetic construct
MDAPRQVVNFGPGPAKLPHSVLLEIQKELLDHKGVGISVLEMSHRSSDFAKIINNTENLVRELLAVPDNYKVIFLQGGGCGQFSAVPLNLIGLKAGRCADYVVTGAWSAKAAEEAKKFGTINIVHPKLGSYTKIPDPSTWNLNPDASYVYYCANETVHGVEFDFIPDVKGAVLVCDMSSNFLSKPVDVSKFGVIFAGAQKNVGSAGVTVVIVRDDLLGFALRECPSVLEYKVQAGNSSLYNTPPCFSIYVMGLVLEWIKNNGGAAAMEKLSSIKSQTIYEIIDNSQGFYVCPVEPQNRSKMNIPFRIGNAKGDDALEKRFLDKALELNMLSLKGHRSVGGIRASLYNAVTIEDVQKLAAFMKKFLEMHQL

SEQ ID NO: 753 - protein, 370 aa, synthetic construct
MDAPRQVVNFGPGPAKLPHSVLLEIQKELLDYKGVGISVLEMSHRSSDFAKIINNTENLVRELLAVPDNYKVSFLQGGGCGQFSAVPLNLIGLKAGRCADYVVTGAWSAKAAEEAKKFGTINIVHPKLGSYTKIPDPSTWNLNPDASYVYYCANETVHGVEFDFIPDVKGAVLVCDMSSNFLSKPVDVSKFGVIFAGAQKNVGSAGVTVVIVRDDLLGFALRECPSVLEYKVQAGNSSLYNTPPCFSIYVMGLVLEWIKNNGGAAAMEKLSSIKSQTIYEIIDNSQGFYVCPVEPQNRSKMNIPFRIGNAKGDDALEKRFLDKALELNMLSLKGHRSVGGIRASLYNAVTIEDVQKLAAFMKKFLEMHQL

SEQ ID NO: 754 - protein, 370 aa, synthetic construct
MDAPRQVVNFGPGPAKLPHSVLLEIQKELLDYKGVGISVLEMSHRSSDFAKIINNTENLVRELLAVPDNYKVIFLQGGGCGQFSAVPLNLIGLKAGRCADYVVTGAWAAKAAEEAKKFGTINIVHPKLGSYTKIPDPSTWNLNPDASYVYYCANETVHGVEFDFIPDVKGAVLVCDMSSNFLSKPVDVSKFGVIFAGAQKNVGSAGVTVVIVRDDLLGFALRECPSVLEYKVQAGNSSLYNTPPCFSIYVMGLVLEWIKNNGGAAAMEKLSSIKSQTIYEIIDNSQGFYVCPVEPQNRSKMNIPFRIGNAKGDDALEKRFLDKALELNMLSLKGHRSVGGIRASLYNAVTIEDVQKLAAFMKKFLEMHQL

SEQ ID NO: 755 - protein, 370 aa, synthetic construct
MDAPRQVVNFGPGPAKLPHSVLLEIQKELLDYKGIGISVLEMSHRSSDFAKIINNTENLVRELLAVPDNYKVIFLQGGGCGQFSAVPLNLIGLKAGRCADYVVTGAWSAKAAEEAKKFGTINIVHPKLGSYTKIPDPSTWNLNPDASYVYYCANETVHGVEFDFIPDVKGAVLVCDMSSNFLSKPVDVSKFGVIFAGAQKNVGSAGVTVVIVRDDLLGFALRECPSVLEYKVQAGNSSLYNTPPCFSIYVMGLVLEWIKNNGGAAAMEKLSSIKSQTIYEIIDNSQGFYVCPVEPQNRSKMNIPFRIGNAKGDDALEKRFLDKALELNMLSLKGHRSVGGIRASLYNAVTIEDVQKLAAFMKKFLEMHQL

SEQ ID NO: 756 - protein, 370 aa, synthetic construct
MDAPRQVVNFGPGPAKLPHSVLLEIQKELLDYKGVGISVLEMSHRSSDFAKIINNTENLVRELLAVPDNYKVIFLQGGGCSQFSAVPLNLIGLKAGRCADYVVTGAWSAKAAEEAKKFGTINIVHPKLGSYTKIPDPSTWNLNPDASYVYYCANETVHGVEFDFIPDVKGAVLVCDMSSNFLSKPVDVSKFGVIFAGAQKNVGSAGVTVVIVRDDLLGFALRECPSVLEYKVQAGNSSLYNTPPCFSIYVMGLVLEWIKNNGGAAAMEKLSSIKSQTIYEIIDNSQGFYVCPVEPQNRSKMNIPFRIGNAKGDDALEKRFLDKALELNMLSLKGHRSVGGIRASLYNAVTIEDVQKLAAFMKKFLEMHQL

SEQ ID NO: 757 - protein, 370 aa, synthetic construct
MDAPRQVVNFGPGPAKLPHSVLLEIQKELLDYKGVGISVLEMSHRSSDFAKIINNTENLVRELLAVPDNYKVIFLQGGGCGQFSAVPLNLIGLKAGRCADYVVTGAWSAKAAEEAKKFGTINIVHPKLGSYTKIPDPSTWNLNPDASYVYYCANETVHGVEFDFIPDVKGAVLVCDMSSNFLSKPMDVSKFGVIFAGAQKNVGSAGVTVVIVRDDLLGFALRECPSVLEYKVQAGNSSLYNTPPCFSIYVMGLVLEWIKNNGGAAAMEKLSSIKSQTIYEIIDNSQGFYVCPVEPQNRSKMNIPFRIGNAKGDDALEKRFLDKALELNMLSLKGHRSVGGIRASLYNAVTIEDVQKLAAFMKKFLEMHQL

SEQ ID NO: 758 - protein, 370 aa, synthetic construct
MDAPRQVVNFGPGPAKLPHSVLLEIQKELLDYKGVGISVLEMSHRSSDFAKIINNTENLVRELLAVPDNYKVIFLQGGGCGQFSAVPLNLIGLKAGRCADYVVTGAWSAKAAEEAKKFGTINIVHPKLGSYTKIPDPSTWNLNPDASYVYYCANETVHGVEFDFKPDVKGAVLVCDMSSNFLSKPVDVSKFGVIFAGAQKNVGSAGVTVVIVRDDLLGFALRECPSVLEYKVQAGNSSLYNTPPCFSIYVMGLVLEWIKNNGGAAAMEKLSSIKSQTIYEIIDNSQGFYVCPVEPQNRSKMNIPFRIGNAKGDDALEKRFLDKALELNMLSLKGHRSVGGIRASLYNAVTIEDVQKLAAFMKKFLEMHQL

SEQ ID NO: 759 - protein, 370 aa, synthetic construct
MDAPRQVVNFGPGPAKLPHSVLLEIQKELLDYKGVGISVLEMSHRSSDFAKIINNTENLVRELLAVPDNYKVIFLQGGGCGQFSAVPLNLIGLKAGRCADYVVTGAWSAKAAEEAKKFGTINIVHPKLGSYTKIPDPSTWNLNPDASYVYYCANETVHGVEFDFIPDVKGAVLVCDMSSNFLSKPVDVSKFGVIFAGAQKNVGSAGVTVVIVRDDLLGFALRECPSVLEYKVQAGNSSLYNTPPCFSIYVMGLVLEWIKNNGGAAAMEKLSSIKSQTIYEIIDNSQGFYVCPVEPQNRSKMNIPFRIGNAKGDDALEKRFLDKALELNMLTLKGHRSVGGIRASLYNAVTIEDVQKLAAFMKKFLEMHQL

SEQ ID NO: 760 - protein, 370 aa, synthetic construct
MDAPRQVVNFGPGPAKLPHSVLIEIQKELLDYKGVGISVLEMSHRSSDFAKIINNTENLVRELLAVPDNYKVIFLQGGGCGQFSAVPLNLIGLKAGRCADYVVTGAWSAKAAEEAKKFGTINIVHPKLGSYTKIPDPSTWNLNPDASYVYYCANETVHGVEFDFIPDVKGAVLVCDMSSNFLSKPVDVSKFGVIFAGAQKNVGSAGVTVVIVRDDLLGFALRECPSVLEYKVQAGNSSLYNTPPCFSIYVMGLVLEWIKNNGGAAAMEKLSSIKSQTIYEIIDNSQGFYVCPVEPQNRSKMNIPFRIGNAKGDDALEKRFLDKALELNMLSLKGHRSVGGIRASLYNAVTIEDVQKLAAFMKKFLEMHQL

SEQ ID NO: 761 - protein, 370 aa, synthetic construct
MDAPRQVVNFGPGPAKLPHSVLLEIQKELLDYKGVGISVLEMSHRSSDFAKIINNTENLVRELLAVPDNYKVIFLQGGGCGQFSAVPLNLIGLKAGRCADYVVTGAWSAKAAEEAKKFGTINIVHPKLGSYTKIPDPSTWNLNPDASYVYYCANETVHGVEFDFIPDVKGAVLVCDMSSNFLSKPVDVSKFGVIFAGAQKNVGSAGVTVVIVRDDLLGFALRECPSVLEYKVQAGNSSLYNTPPCFSIYVMGLVLEWIKNNGGAAAMEKLSSIKSQTIYEIIDNSQGFYVCPVEPQNRSKMNIPFRIGNAKGDDALQKRFLDKALELNMLSLKGHRSVGGIRASLYNAVTIEDVQKLAAFMKKFLEMHQL

SEQ ID NO: 762 - protein, 370 aa, synthetic construct
MDAPRQVVNFGPGPAKLPHSVLLEIQKELLDYKGVGISLLEMSHRSSDFAKIINNTENLVRELLAVPDNYKVIFLQGGGCGQFSAVPLNLIGLKAGRCADYVVTGAWSAKAAEEAKKFGTINIVHPKLGSYTKIPDPSTWNLNPDASYVYYCANETVHGVEFDFIPDVKGAVLVCDMSSNFLSKPVDVSKFGVIFAGAQKNVGSAGVTVVIVRDDLLGFALRECPSVLEYKVQAGNSSLYNTPPCFSIYVMGLVLEWIKNNGGAAAMEKLSSIKSQTIYEIIDNSQGFYVCPVEPQNRSKMNIPFRIGNAKGDDALEKRFLDKALELNMLSLKGHRSVGGIRASLYNAVTIEDVQKLAAFMKKFLEMHQL

SEQ ID NO: 763 - protein, 370 aa, synthetic construct
MDAPRQVVNFGPGPAKLPHSVLLEIQKELLDYKGVGISVLEMSHRSSDFAKIINNTENLVRELLAVPDNYKVIFLQGGGCGQFSAVPLNLIGLKAGRCADYVVTGAWSAKAAEEAKKFGTINIVHPKLGSYTKIPDPSSWNLNPDASYVYYCANETVHGVEFDFIPDVKGAVLVCDMSSNFLSKPVDVSKFGVIFAGAQKNVGSAGVTVVIVRDDLLGFALRECPSVLEYKVQAGNSSLYNTPPCFSIYVMGLVLEWIKNNGGAAAMEKLSSIKSQTIYEIIDNSQGFYVCPVEPQNRSKMNIPFRIGNAKGDDALEKRFLDKALELNMLSLKGHRSVGGIRASLYNAVTIEDVQKLAAFMKKFLEMHQL

SEQ ID NO: 764 - protein, 370 aa, synthetic construct
MDAPRQVVNFGPGPAKLPHSVLLEIQKELLDYKGVGISVLEMSHRSSDFAKIINNTENLVRELLAVPDNYKVIFLQGGGCGQFSAVPLNLIGLKAGRCADYVVTGAWSAKAAEEAKKFGTINIVHLKLGSYTKIPDPSTWNLNPDASYVYYCANETVHGVEFDFIPDVKGAVLVCDMSSNFLSKPVDVSKFGVIFAGAQKNVGSAGVTVVIVRDDLLGFALRECPSVLEYKVQAGNSSLYNTPPCFSIYVMGLVLEWIKNNGGAAAMEKLSSIKSQTIYEIIDNSQGFYVCPVEPQNRSKMNIPFRIGNAKGDDALEKRFLDKALELNMLSLKGHRSVGGIRASLYNAVTIEDVQKLAAFMKKFLEMHQL

SEQ ID NO: 765 - protein, 370 aa, synthetic construct
MDAPRQVVNFGPGPAKLPDSVLLEIQKELLDYKGVGISVLEMSHRSSDFAKIINNTENLVRELLAVPDNYKVIFLQGGGCGQFSAVPLNLIGLKAGRCADYVVTGAWSAKAAEEAKKFGTINIVHPKLGSYTKIPDPSTWNLNPDASYVYYCANETVHGVEFDFIPDVKGAVLVCDMSSNFLSKPVDVSKFGVIFAGAQKNVGSAGVTVVIVRDDLLGFALRECPSVLEYKVQAGNSSLYNTPPCFSIYVMGLVLEWIKNNGGAAAMEKLSSIKSQTIYEIIDNSQGFYVCPVEPQNRSKMNIPFRIGNAKGDDALEKRFLDKALELNMLSLKGHRSVGGIRASLYNAVTIEDVQKLAAFMKKFLEMHQL

SEQ ID NO: 766 - protein, 370 aa, synthetic construct
MDAPRQVVNFGPGPAKLAHSVLLEIQKELLDYKGVGISVLEMSHRSSDFAKIINNTENLVRELLAVPDNYKVIFLQGGGCGQFSAVPLNLIGLKAGRCADYVVTGAWSAKAAEEAKKFGTINIVHPKLGSYTKIPDPSTWNLNPDASYVYYCANETVHGVEFDFIPDVKGAVLVCDMSSNFLSKPVDVSKFGVIFAGAQKNVGSAGVTVVIVRDDLLGFALRECPSVLEYKVQAGNSSLYNTPPCFSIYVMGLVLEWIKNNGGAAAMEKLSSIKSQTIYEIIDNSQGFYVCPVEPQNRSKMNIPFRIGNAKGDDALEKRFLDKALELNMLSLKGHRSVGGIRASLYNAVTIEDVQKLAAFMKKFLEMHQL

SEQ ID NO: 767 - protein, 370 aa, synthetic construct
MDAPRQVVNFGPGPAKLPHSVLLEIQKELLDYKGVGISVLEMSHRSSDFAKIINNTENLVRELLAVPDNYKVIFLQGGGCGQFSAVPLNLIGLKAGRCADYVVTGAWSAKAAEEAKKFGTINIVHPKLGSYTKIPDPSTWNLNPDASYVYYCANETVHGVEFDFIPDVKGAVLVCDMSSNFLSKPVDVSKFGVIFAGAQKNVGSAGVTVVIFRDDLLGFALRECPSVLEYKVQAGNSSLYNTPPCFSIYVMGLVLEWIKNNGGAAAMEKLSSIKSQTIYEIIDNSQGFYVCPVEPQNRSKMNIPFRIGNAKGDDALEKRFLDKALELNMLSLKGHRSVGGIRASLYNAVTIEDVQKLAAFMKKFLEMHQL

SEQ ID NO: 768 - protein, 370 aa, synthetic construct
MDAPRQVVNFGPGPAKLPHSVLLEIQKELLDYKGVGISVLEMSHRSSDFAKIINNTENLVRELLAVPDNYKVIFLQGGGCCQFSAVPLNLIGLKAGRCADYVVTGAWSAKAAEEAKKFGTINIVHPKLGSYTKIPDPSTWNLNPDASYVYYCANETVHGVEFDFIPDVKGAVLVCDMSSNFLSKPVDVSKFGVIFAGAQKNVGSAGVTVVIVRDDLLGFALRECPSVLEYKVQAGNSSLYNTPPCFSIYVMGLVLEWIKNNGGAAAMEKLSSIKSQTIYEIIDNSQGFYVCPVEPQNRSKMNIPFRIGNAKGDDALEKRFLDKALELNMLSLKGHRSVGGIRASLYNAVTIEDVQKLAAFMKKFLEMHQL

SEQ ID NO: 769 - protein, 370 aa, synthetic construct
MDAPRQVVNFGPGPAKLPHSVLLEIQKELLDYKGVGISVLEMSHRSSDFAKIINNTENLVRELLAVPDNYKVIFLQGGGCGQFSAVPLNLIGLKAGRCADYVVTGAWSAKAAEEAKKFGTINIVHPKLGSYTKIPDPSTWNLNPDASYVYYCANETVQGVEFDFIPDVKGAVLVCDMSSNFLSKPVDVSKFGVIFAGAQKNVGSAGVTVVIVRDDLLGFALRECPSVLEYKVQAGNSSLYNTPPCFSIYVMGLVLEWIKNNGGAAAMEKLSSIKSQTIYEIIDNSQGFYVCPVEPQNRSKMNIPFRIGNAKGDDALEKRFLDKALELNMLSLKGHRSVGGIRASLYNAVTIEDVQKLAAFMKKFLEMHQL

SEQ ID NO: 770 - protein, 370 aa, synthetic construct
MDAPRQVVNFGPGPAKLPHSVLLEIQKELLDYKGVGISVLEMSHRSSDFAKIINNTENLVRELLAVPDNYKVIFLQGGGCGQFSAVPLNLIGLKAGRCADYVVTGAWSAKAAEEAKKFGTINIVHPKLGSYTKIPDPSTWNLNPDASYVYYCANETVHGVEFDFIPDVKGAVPVCDMSSNFLSKPVDVSKFGVIFAGAQKNVGSAGVTVVIVRDDLLGFALRECPSVLEYKVQAGNSSLYNTPPCFSIYVMGLVLEWIKNNGGAAAMEKLSSIKSQTIYEIIDNSQGFYVCPVEPQNRSKMNIPFRIGNAKGDDALEKRFLDKALELNMLSLKGHRSVGGIRASLYNAVTIEDVQKLAAFMKKFLEMHQL

SEQ ID NO: 771 - protein, 370 aa, synthetic construct
MDAPRQVVNFGPGPAKLPHSVLLEIQKELLDYKGVGISVLEMSHRSSDFAKIINNTENLVRELLAVPDNYKVIFLQGGGCGQFSAVPLNLIGLKAGRCADYVVTGAWSAKAAEEAKKFGTINIVHPKLGSYTKIPDPSTWNLNPDASYVYYCANETVHGVEFDFIPDVKGAVLVCDMSSNFLSKPVDVSKFGVIFAGAQKNVGSAGVTVVIVRDDLLGFALRECPSVLEYKVQAGNSSLYNTPPCFSIYVMGLVLEWIKNNGGAAAMEKLSSIKSQTIYEIIDNSQGFYVCPVEPQNRSKMNIPFRIGNAKGDDALEKRFLDKALELNMLSLKGHRSVGGIRASLYNVVTIEDVQKLAAFMKKFLEMHQL

SEQ ID NO: 772 - protein, 370 aa, synthetic construct
MDAPRQVVNFGPGPAKLPHSVLLEIQKELLDYKGVGISVLEMSHRSSDFAKIINNTENLVRELLAVPDNYKVIFLQGGGCGQFSAVPLNLIGLKAGRCADYVVTGAWSAKAAEEAKKFGTINIVHPKLGSYTKIPDPSTWNLNPDASYVYYCANETVHGVEFDFIPDVKGAVLVCDMSSNFLSKPVDVSKFGVIFAGAQKNVGSAGVTVVIVRDDLLGFALRECPSVLEYKVQAGNSSLYNTPPCFSIYVMGLVLEWIKNNGGAAAMEKLSSIKSQTIYEIIDNSQGFYVCPVEPQNRSKMNIPFRIGNAKGDDAFEKRFLDKALELNMLSLKGHRSVGGIRASLYNAVTIEDVQKLAAFMKKFLEMHQL

SEQ ID NO: 773 - protein, 370 aa, synthetic construct
MDAPRQVVNFGPGPAKLPHSVLLEIQKELLDYKGVGISVLEMSHRSSDFAKIINNTENLVRELLAVPDNYKVIFLQGGGCGQFSAVPLNLIGLKAGRCADYVVTGAWSAKAAEEAKKFGTINIVHPKLGSYTKIPDPSTWNLNPDASYVYYCANETVHGVEFDFIPDVKGAVLVCDMSSIFLSKPVDVSKFGVIFAGAQKNVGSAGVTVVIVRDDLLGFALRECPSVLEYKVQAGNSSLYNTPPCFSIYVMGLVLEWIKNNGGAAAMEKLSSIKSQTIYEIIDNSQGFYVCPVEPQNRSKMNIPFRIGNAKGDDALEKRFLDKALELNMLSLKGHRSVGGIRASLYNAVTIEDVQKLAAFMKKFLEMHQL

SEQ ID NO: 774 - protein, 370 aa, synthetic construct
MDAPRQVVNFGPGPAKLPHSVLLEIQKELLDYKGVGISVLEMSHRSSDFAKIINNTVNLVRELLAVPDNYKVIFLQGGGCGQFSAVPLNLIGLKAGRCADYVVTGAWSAKAAEEAKKFGTINIVHPKLGSYTKIPDPSTWNLNPDASYVYYCANETVHGVEFDFIPDVKGAVLVCDMSSNFLSKPVDVSKFGVIFAGAQKNVGSAGVTVVIVRDDLLGFALRECPSVLEYKVQAGNSSLYNTPPCFSIYVMGLVLEWIKNNGGAAAMEKLSSIKSQTIYEIIDNSQGFYVCPVEPQNRSKMNIPFRIGNAKGDDALEKRFLDKALELNMLSLKGHRSVGGIRASLYNAVTIEDVQKLAAFMKKFLEMHQL

SEQ ID NO: 775 - protein, 370 aa, synthetic construct
MDAPRQVVNFGPGPAKLPHSVLLEIQKELLDYKGVGISVLEMSHRSSDFAKIINNTENLVRELLAVPDNYKVIFLQGGGCGQFSAVPLNLIGLKAGRCADYVVTGAWSAKAAEEAKKFGTINIVHPKLGSYTKIPDPSTWNLNPDASYVYYCANETVHGVEFDFIPDVKGAVLVCDMSSNFLSKPVDVSKFGVIFAGAQKNVGSAGVTVVIVRDDLLGFALRECPSVLEYKVQAENSSLYNTPPCFSIYVMGLVLEWIKNNGGAAAMEKLSSIKSQTIYEIIDNSQGFYVCPVEPQNRSKMNIPFRIGNAKGDDALEKRFLDKALELNMLSLKGHRSVGGIRASLYNAVTIEDVQKLAAFMKKFLEMHQL

SEQ ID NO: 776 - protein, 370 aa, synthetic construct
MDAPRQVVNFGPGPAKLPHSVLLEIQKELLDYKGVGISVLEMSHRSSDFAKIINNTENLVRELLAVPDNYKVIFLQGGGCGQFSAVPLNLIGLKAGRCADYVVTGAWSAKAAEEAKKFGTINIVHPKLGSYTKIPDPSTWNLNPDASYVYYCANETVHGVEFDFIPDVKGAVLVCDMSSNFLSKPVDVSKFGVIFAGAQKNVGSAGVTVVIVRDDLLGFALRECPSVLEYKVQAGNSSLYNTPPCFSIYVMGLVLEWIKNNGGAAAMEKLSSIKSQTIYEIIDNSQGFYVCPVEPQNRSKMNIAFRIGNAKGDDALEKRFLDKALELNMLSLKGHRSVGGIRASLYNAVTIEDVQKLAAFMKKFLEMHQL

SEQ ID NO: 777 - protein, 370 aa, synthetic construct
MDAPRQVVNFGPGPAKLPHSVLLEIQKELLDYKGVGISVLEMSHRSSDFAKIINNTENLVRELLAVPDNYKVIFLQGGGCGQFSAVPLNLIGLKAGRCADYVVTGAWSAKAAEEAKKFGTINIVHPKLGSYTKIPDPSTWNLNPVASYVYYCANETVHGVEFDFIPDVKGAVLVCDMSSNFLSKPVDVSKFGVIFAGAQKNVGSAGVTVVIVRDDLLGFALRECPSVLEYKVQAGNSSLYNTPPCFSIYVMGLVLEWIKNNGGAAAMEKLSSIKSQTIYEIIDNSQGFYVCPVEPQNRSKMNIPFRIGNAKGDDALEKRFLDKALELNMLSLKGHRSVGGIRASLYNAVTIEDVQKLAAFMKKFLEMHQL

SEQ ID NO: 778 - protein, 370 aa, synthetic construct
MDAPRQVVNFGPGPAKLPHSVLLDIQKELLDYKGVGISVLEMSHRSSDFAKIINNTENLVRELLAVPDNYKVIFLQGGGCGQFSAVPLNLIGLKAGRCADYVVTGAWSAKAAEEAKKFGTINIVHPKLGSYTKIPDPSTWNLNPDASYVYYCANETVHGVEFDFIPDVKGAVLVCDMSSNFLSKPVDVSKFGVIFAGAQKNVGSAGVTVVIVRDDLLGFALRECPSVLEYKVQAGNSSLYNTPPCFSIYVMGLVLEWIKNNGGAAAMEKLSSIKSQTIYEIIDNSQGFYVCPVEPQNRSKMNIPFRIGNAKGDDALEKRFLDKALELNMLSLKGHRSVGGIRASLYNAVTIEDVQKLAAFMKKFLEMHQL

SEQ ID NO: 779 - protein, 370 aa, synthetic construct
MDAPRQVVNFGPGPAKLPHSVLLEIQKELLDYKGVGISVLEMSHRSSDFAKIINNTENLVRELLAVPDNYKVIFLQGGGCGQFSAVPLNLIGLKAGRCADYVVTGAWSAKATEEAKKFGTINIVHPKLGSYTKIPDPSTWNLNPDASYVYYCANETVHGVEFDFIPDVKGAVLVCDMSSNFLSKPVDVSKFGVIFAGAQKNVGSAGVTVVIVRDDLLGFALRECPSVLEYKVQAGNSSLYNTPPCFSIYVMGLVLEWIKNNGGAAAMEKLSSIKSQTIYEIIDNSQGFYVCPVEPQNRSKMNIPFRIGNAKGDDALEKRFLDKALELNMLSLKGHRSVGGIRASLYNAVTIEDVQKLAAFMKKFLEMHQL

SEQ ID NO: 780 - protein, 370 aa, synthetic construct
MDAPRQVVNFGPGPAKLPHSVLLEIQKELLDYKGVGISVLEMSHRSSDFAKIINNTENLVRELLAVPDNYKVIFLQGGGCGQFSAVPLNLIGLKAGRCADYVVTGAWSAKAAEEAKKFGTINIVHPKLGSYTKIPDPSTWNLNPDASYVYYCANETVHGVEFDFIPDVKGAVLVCDMSSNFLSKPVDVSKFGVIFAGAQKNVGSAGVTVVIVRDDLLGFALRECPSVLEYKVQAGNSSLYNTPPCFSIYVMGLVLEWIKNNGGAAAMEKLSSIKSQTIYEIIDNSQGFYVCPVEPQNRSKMNIPFRIGNAKGDDALEKRFLDRALELNMLSLKGHRSVGGIRASLYNAVTIEDVQKLAAFMKKFLEMHQL

SEQ ID NO: 781 - protein, 370 aa, synthetic construct
MDAPRQVVNFGPGPAKLPHSVLLEIQKELLDYKGVGISVLEMSHRSSDFAKIINNTENLVRELLAVPDNYKVIFLQGGGCGQFSAVPLNLIGLKAGRCADYVVTGAWSAKAAEEAKKFGTINIVHPKLGSYTKIPDPSTWNLNPDASYVYYCANETVHGVEFDFIPDVKGAVLVCDMSSNFLSKPVDVSKFGVIFAGAQKNVGSAGVTVVIVRDDLLGFALRECPSVLEYKVQAGNSSLYNTPPCFSIYVMGLVLEWIKNNGGAAAMEKLSSIKSQTIYEIIDNSQGFYVCPVEPPNRSKMNIPFRIGNAKGDDALEKRFLDKALELNMLSLKGHRSVGGIRASLYNAVTIEDVQKLAAFMKKFLEMHQL

SEQ ID NO: 782 - protein, 370 aa, synthetic construct
MDAPRQVVNFGPGPAKLPHSVLLEIQKELLDYKGVGISVLEMGHRSSDFAKIINNTENLVRELLAVPDNYKVIFLQGGGCGQFSAVPLNLIGLKAGRCADYVVTGAWSAKAAEEAKKFGTINIVHPKLGSYTKIPDPSTWNLNPDASYVYYCANETVHGVEFDFIPDVKGAVLVCDMSSNFLSKPVDVSKFGVIFAGAQKNVGSAGVTVVIVRDDLLGFALRECPSVLEYKVQAGNSSLYNTPPCFSIYVMGLVLEWIKNNGGAAAMEKLSSIKSQTIYEIIDNSQGFYVCPVEPQNRSKMNIPFRIGNAKGDDALEKRFLDKALELNMLSLKGHRSVGGIRASLYNAVTIEDVQKLAAFMKKFLEMHQL

SEQ ID NO: 783 - protein, 370 aa, synthetic construct
MDAPRQVVNFGPGPAKLPHSVLLEIQKELLDYKGVGISVLEMSHRSSDFAKIINNTENLVRELLAVPDNYKVIFLQGGGCGQFSAVPLNLIGLKAGRCADYVVTGAWSAKAAEEAKKFGTINIVHPKLGSYTKIPDPSTWNLNPDASYVYYCANETVHGVEFDFIPDVKGAVLVCDMSSNFLSKPVDVSKFGVIFAGAQKNVGSAGVTVVIVRDDLLGFALRECPSVLEYKVQAGNSSLYNTPPCFSIYVMGLVLEWIKNNGGAAAMEKLSSIKSQTIYEIIDNSQGFYVCPVEPQNRSKMNIPFRIGNAKGDDALEKRFLDKALELNMLSLKGHRSVGGIRASLYNAVTVEDVQKLAAFMKKFLEMHQL

SEQ ID NO: 784 - protein, 370 aa, synthetic construct
MDAPRQVVNFGPGPAKLPHSVLLEIQKELLDYKGVGISVLEMSHRSSDFAKIINNTENLVRELLAVPDKYKVIFLQGGGCGQFSAVPLNLIGLKAGRCADYVVTGAWSAKAAEEAKKFGTINIVHPKLGSYTKIPDPSTWNLNPDASYVYYCANETVHGVEFDFIPDVKGAVLVCDMSSNFLSKPVDVSKFGVIFAGAQKNVGSAGVTVVIVRDDLLGFALRECPSVLEYKVQAGNSSLYNTPPCFSIYVMGLVLEWIKNNGGAAAMEKLSSIKSQTIYEIIDNSQGFYVCPVEPQNRSKMNIPFRIGNAKGDDALEKRFLDKALELNMLSLKGHRSVGGIRASLYNAVTIEDVQKLAAFMKKFLEMHQL

SEQ ID NO: 785 - protein, 370 aa, synthetic construct
MDAPRQVVNFGPGPAKLPHSVLLEIQKELLDYKGVGISVLEMSHRSSDFAKIINNTENLVRELLAVPDNYKVIFLQGGGCGQFSAVPLNLIGLKAGRCADYVVTGAWSAKAAEEAKKFGTINIVHPKLGSYTKIPDPSTWNLNPDASYVYYCANETVHGVEFDFIPDVKGAVLVCDMSSNFLSKPVDVSKFGVIFAGAQKNVGSAGVTVVIVRDDLLGFALRECPSVLEYKVQAGNSSLYNTPPCFSIYVMGLVLEWIKNNGGAAAMEKLSSIKSQTIYEIIDNSQGFYVCPVEPQNRSKMNIPFRIGNAKGDDALEKRFLDKALELNMLSLKRHRSVGGIRASLYNAVTIEDVQKLAAFMKKFLEMHQL

SEQ ID NO: 786 - protein, 370 aa, synthetic construct
MDAPRQVVNFGPGPAKLPHSVLLEIQKELLDYKGVGISVLEMSHRSSDFAKIINNTENLVRELLAVPDNYKVIFLQGGGCGQFSAVPLNLIGLKAGRCADYVVTGAWSAKAAEEAKKFGTINIVHPKLGSYTKIPDPSTWNLNPDASYVYYCANETVHGVEFDFIPDVKGAVLVCDMSSNFLSKPVDVSKFGVIFAGAQKNVGSAGVTVVIVRDDLLGFALPECPSVLEYKVQAGNSSLYNTPPCFSIYVMGLVLEWIKNNGGAAAMEKLSSIKSQTIYEIIDNSQGFYVCPVEPQNRSKMNIPFRIGNAKGDDALEKRFLDKALELNMLSLKGHRSVGGIRASLYNAVTIEDVQKLAAFMKKFLEMHQL

SEQ ID NO: 787 - protein, 370 aa, synthetic construct
MDAPRQVVNFGPGPAKLPHSVLLEIQKELLDYKGVGISVLEMSHRSSDFAKIINNTENLVRELLAVPDNYKVIFLQGGGCGQFSAVPLNLIGLKAGRCADYVVTGAWSAKAAEEAKKFGSINIVHPKLGSYTKIPDPSTWNLNPDASYVYYCANETVHGVEFDFIPDVKGAVLVCDMSSNFLSKPVDVSKFGVIFAGAQKNVGSAGVTVVIVRDDLLGFALRECPSVLEYKVQAGNSSLYNTPPCFSIYVMGLVLEWIKNNGGAAAMEKLSSIKSQTIYEIIDNSQGFYVCPVEPQNRSKMNIPFRIGNAKGDDALEKRFLDKALELNMLSLKGHRSVGGIRASLYNAVTIEDVQKLAAFMKKFLEMHQL

SEQ ID NO: 788 - protein, 370 aa, synthetic construct
MDAPRQVVNFGPGPAKLPHSVLLEIQKALLDYKGVGISVLEMSHRSSDFAKIINNTENLVRELLAVPDNYKVIFLQGGGCGQFSAVPLNLIGLKAGRCADYVVTGAWSAKAAEEAKKFGTINIVHPKLGSYTKIPDPSTWNLNPDASYVYYCANETVHGVEFDFIPDVKGAVLVCDMSSNFLSKPVDVSKFGVIFAGAQKNVGSAGVTVVIVRDDLLGFALRECPSVLEYKVQAGNSSLYNTPPCFSIYVMGLVLEWIKNNGGAAAMEKLSSIKSQTIYEIIDNSQGFYVCPVEPQNRSKMNIPFRIGNAKGDDALEKRFLDKALELNMLSLKGHRSVGGIRASLYNAVTIEDVQKLAAFMKKFLEMHQL

SEQ ID NO: 789 - protein, 370 aa, synthetic construct
MDAPRQVVNFGPGPAKLPHSVLLEIQKELLDYKGVGISVLEMSHRSSDFAKIINNTENLVRELLAVPDNYKVIFLQGGGCGQFSAVPLNLIGLKAGRCADYVVTGAWSAKAAEEAKKFGTINIVHPKLGSYTKIPDPSTWNLNPDASYVYYCANETVHGVEFDFIPDVKGAVLVCDMSSNFLSKPVDVSKFGVIFAGAQKNVGSAGVTVVIVRDDLLGFALRECPSVLEYKVQAGNSSLYNTPPCFSIYVMGLVLEWIKNNGGAAAMEKLSSIKSQTIYEIIDNSQGFYVCPVEPQNRSKMNIPFRIGNAKGDDALEKRFLDKALELNMLSLKGHRSVGGIRASLYNAVTIEDVQKLAAFMKKFLGMHQL

SEQ ID NO: 790 - protein, 370 aa, synthetic construct
MDAPRQVVNFGPGPAKLPHSVLLEIQKELLDYKGVGISVLEMSHRSSDFAKIINNTENLVRELLAVPDNYKVIFLQGGGCGQFSAVPLNLIGLKAGRCADYVVTGAWSAKAAEEAKKFGTINIVHPKLGSYTKIPDPSTWNLNPDASYVYYCANETVHGVEFDFIPDIKGAVLVCDMSSNFLSKPVDVSKFGVIFAGAQKNVGSAGVTVVIVRDDLLGFALRECPSVLEYKVQAGNSSLYNTPPCFSIYVMGLVLEWIKNNGGAAAMEKLSSIKSQTIYEIIDNSQGFYVCPVEPQNRSKMNIPFRIGNAKGDDALEKRFLDKALELNMLSLKGHRSVGGIRASLYNAVTIEDVQKLAAFMKKFLEMHQL

SEQ ID NO: 791 - protein, 370 aa, synthetic construct
MDAPRQVVNFGPGPAKLPHSVLLEIQKELLDYKGVGISVLEMSHRSSDFAKIINNTENLVRELLAVPDNYKAIFLQGGGCGQFSAVPLNLIGLKAGRCADYVVTGAWSAKAAEEAKKFGTINIVHPKLGSYTKIPDPSTWNLNPDASYVYYCANETVHGVEFDFIPDVKGAVLVCDMSSNFLSKPVDVSKFGVIFAGAQKNVGSAGVTVVIVRDDLLGFALRECPSVLEYKVQAGNSSLYNTPPCFSIYVMGLVLEWIKNNGGAAAMEKLSSIKSQTIYEIIDNSQGFYVCPVEPQNRSKMNIPFRIGNAKGDDALEKRFLDKALELNMLSLKGHRSVGGIRASLYNAVTIEDVQKLAAFMKKFLEMHQL

SEQ ID NO: 792 - protein, 370 aa, synthetic construct
MDAPRQVVNFGPGPAKLPHSVLLEIQKELLDYKGVGISVLEMSHRSSDFAKIINNTENLVRELLAVPDNYKVIFLQGGGCGQFSAVPLNLIGLKAGRCADYVVTGAWSAKAAEEAKKFGTINIVHPKLGSYTKIPDPSTWNLNPDASYVYYCANETVHGVEFDFIPDVKGAVLVCDMSSNFLSKPVDVSKFGVIFAGAQKNVGSAGVTVVIVRDDLLGFALRECPSVLEYKVQAGNSSLYNTPPCFSIYVMGLVLEWIKNNGGAAAMEKLSSIKSQTIYEIIDNSQGFYVCPVEPQNRSKMNIPFRIGNAKGDDALEKRFLDKALELNMLSLKGHRSVGGIRASLYNAVTIEHVQKLAAFMKKFLEMHQL

SEQ ID NO: 793 - protein, 370 aa, synthetic construct
MDAPRQVVNFGPGPAKLPHSVLLEIQKELLDYKGVGISVLEMSHRSSDFAKIINNTENLVRELLAVPDNYKVIFLQGGGCGQFSAVPLNLIGLKAGRCADYVVTGAWSAKAAEEAKKFGTINIVHPKLGSYTKIPDPSTWNLNPDASYVYYCANETVHGVEFDFIPDVKGAVLVCDMSSNFLSKPVDVSKFGVIFAGAQKNVGSAGVTVVIVRDDLLGFALRECPSVLEYKVQAGNSSLYNTPPCFSIYVMGLVLEWIKNNGGAAAMEKLSSIKSQTIYEIIDNSQGFYVCPVEPQNRSKMNIPFRIGNAKGDDALEKRFLDKALELNMLSLKGHRSVGGSRASLYNAVTIEDVQKLAAFMKKFLEMHQL

SEQ ID NO: 794 - protein, 370 aa, synthetic construct
MDAPRQVVNFGPGPAKLPHSVLLEIQKELLDYKGVGISVLEMSHRSSDFAKIINNTENLVRELLAVPDNYKVIFLQGGGCGQFSAVPLNLIGSKAGRCADYVVTGAWSAKAAEEAKKFGTINIVHPKLGSYTKIPDPSTWNLNPDASYVYYCANETVHGVEFDFIPDVKGAVLVCDMSSNFLSKPVDVSKFGVIFAGAQKNVGSAGVTVVIVRDDLLGFALRECPSVLEYKVQAGNSSLYNTPPCFSIYVMGLVLEWIKNNGGAAAMEKLSSIKSQTIYEIIDNSQGFYVCPVEPQNRSKMNIPFRIGNAKGDDALEKRFLDKALELNMLSLKGHRSVGGIRASLYNAVTIEDVQKLAAFMKKFLEMHQL

SEQ ID NO: 795 - protein, 370 aa, synthetic construct
MDAPRQVVNFGPGPAKLPHSVLLEIQKELLDYKGVGISVLEMSHRSSDFAKIINNTENLVRELLAVPDNYKVIFLQGGGCGQFSAVPLNLIGLKAGRCADYVVTGAWSAKAAEEAKKFGTINIVHPKLGSYTKIPDPSTWNHNPDASYVYYCANETVHGVEFDFIPDVKGAVLVCDMSSNFLSKPVDVSKFGVIFAGAQKNVGSAGVTVVIVRDDLLGFALRECPSVLEYKVQAGNSSLYNTPPCFSIYVMGLVLEWIKNNGGAAAMEKLSSIKSQTIYEIIDNSQGFYVCPVEPQNRSKMNIPFRIGNAKGDDALEKRFLDKALELNMLSLKGHRSVGGIRASLYNAVTIEDVQKLAAFMKKFLEMHQL

SEQ ID NO: 796 - protein, 370 aa, synthetic construct
MDAPRQVVNFGPGPAKLPHSVLLEIQKELLDYKGVGISVLEMSHRSSDFAKIINNTENLVRELLAVPDNYKVIFLQGGGCGQFSAVPLNLIGLKAGRCADYVVTGAWSAKAAEEAKKFGTINIVHPKLGSYTKIPDPSNWNLNPDASYVYYCANETVHGVEFDFIPDVKGAVLVCDMSSNFLSKPVDVSKFGVIFAGAQKNVGSAGVTVVIVRDDLLGFALRECPSVLEYKVQAGNSSLYNTPPCFSIYVMGLVLEWIKNNGGAAAMEKLSSIKSQTIYEIIDNSQGFYVCPVEPQNRSKMNIPFRIGNAKGDDALEKRFLDKALELNMLSLKGHRSVGGIRASLYNAVTIEDVQKLAAFMKKFLEMHQL

SEQ ID NO: 797 - protein, 370 aa, synthetic construct
MDAPRQVVNFGPGPAKLPHSVLLEIQKELLEYKGVGISVLEMSHRSSDFAKIINNTENLVRELLAVPDNYKVIFLQGGGCGQFSAVPLNLIGLKAGRCADYVVTGAWSAKAAEEAKKFGTINIVHPKLGSYTKIPDPSTWNLNPDASYVYYCANETVHGVEFDFIPDVKGAVLVCDMSSNFLSKPVDVSKFGVIFAGAQKNVGSAGVTVVIVRDDLLGFALRECPSVLEYKVQAGNSSLYNTPPCFSIYVMGLVLEWIKNNGGAAAMEKLSSIKSQTIYEIIDNSQGFYVCPVEPQNRSKMNIPFRIGNAKGDDALEKRFLDKALELNMLSLKGHRSVGGIRASLYNAVTIEDVQKLAAFMKKFLEMHQL

SEQ ID NO: 798 - protein, 370 aa, synthetic construct
MDAPRQVVNFGPGPAKLPHSVLLEIQKELLDYKGVGISVLEMSHRSSDFAKIINNTENLVRELLAVPDNYKVIFLQGGGCGQFSAVPLNLIGLKAGRCADYVVTGAWSAKAAEEAKKFGTINIVHPKLGSYTKIPDTSTWNLNPDASYVYYCANETVHGVEFDFIPDVKGAVLVCDMSSNFLSKPVDVSKFGVIFAGAQKNVGSAGVTVVIVRDDLLGFALRECPSVLEYKVQAGNSSLYNTPPCFSIYVMGLVLEWIKNNGGAAAMEKLSSIKSQTIYEIIDNSQGFYVCPVEPQNRSKMNIPFRIGNAKGDDALEKRFLDKALELNMLSLKGHRSVGGIRASLYNAVTIEDVQKLAAFMKKFLEMHQL

SEQ ID NO: 799 - protein, 370 aa, synthetic construct
MDAPRQVVNFGPGPAKLPHSVLLEIQKELLDYKGVGISVLEMSHRSSDFAKIINNTENLVRELLAVPDNYKVIFLQGGGCGQFSAVPLNLIGLKAGRCADYVVTGAWSAKAAEEAKKFGTINIVHPKLGSYTKIPDPSTWNLNPDASYVYYCANETVHGVEFDFIPDVKGAVLVCDMSSNYLSKPVDVSKFGVIFAGAQKNVGSAGVTVVIVRDDLLGFALRECPSVLEYKVQAGNSSLYNTPPCFSIYVMGLVLEWIKNNGGAAAMEKLSSIKSQTIYEIIDNSQGFYVCPVEPQNRSKMNIPFRIGNAKGDDALEKRFLDKALELNMLSLKGHRSVGGIRASLYNAVTIEDVQKLAAFMKKFLEMHQL

SEQ ID NO: 800 - protein, 370 aa, synthetic construct
MDAPRQVVNFGPGPAKLPHSVLLEIQKELLDYKGVGISVLEMSHRSSDFAKIINNTENLVRELLAVPDNYKVIFLQGGGCGQFSAVPLNLIGLKAGRCADYVVTGAWSAKAAEEAKKFGTINIVHPKLGSYTKIPDPSTWNLNPDASYVYYCANETVHGVEFDFIPDVKGAVLVCDMSSNFLSKPVDVSKFGVIFAGAQKNVGSAGVTVVIVRDDLLGFALRECPSVLEYKVQAGNSSLYNTPPCFSIYVMGLVLEWIKNNGGAAAMEKLSSIKSQTIYEIIDNSQGFYVCPVEPQNRSKMNIPFRIGDAKGDDALEKRFLDKALELNMLSLKGHRSVGGIRASLYNAVTIEDVQKLAAFMKKFLEMHQL

SEQ ID NO: 801 - protein, 370 aa, synthetic construct
MDAPRQVVNFGPGPAKLPHSVLLEIQKELLDYKGVGISVLEMSHRSSDFAKIINNTENLVRELLAVPDNYKVIFLQGGGCGQFSAVPLNLIGLKAGRCADYVATGAWSAKAAEEAKKFGTINIVHPKLGSYTKIPDPSTWNLNPDASYVYYCANETVHGVEFDFIPDVKGAVLVCDMSSNFLSKPVDVSKFGVIFAGAQKNVGSAGVTVVIVRDDLLGFALRECPSVLEYKVQAGNSSLYNTPPCFSIYVMGLVLEWIKNNGGAAAMEKLSSIKSQTIYEIIDNSQGFYVCPVEPQNRSKMNIPFRIGNAKGDDALEKRFLDKALELNMLSLKGHRSVGGIRASLYNAVTIEDVQKLAAFMKKFLEMHQL

SEQ ID NO: 802 - protein, 370 aa, synthetic construct
MDAPRQVVNFGPGPAKLPHSVLLEIQKELLDYKGVGISVLEMSHRSSDFAKIINNTENLVRELLAVPDNYKVIFPQGGGCGQFSAVPLNLIGLKAGRCADYVVTGAWSAKAAEEAKKFGTINIVHPKLGSYTKIPDPSTWNLNPDASYVYYCANETVHGVEFDFIPDVKGAVLVCDMSSNFLSKPVDVSKFGVIFAGAQKNVGSAGVTVVIVRDDLLGFALRECPSVLEYKVQAGNSSLYNTPPCFSIYVMGLVLEWIKNNGGAAAMEKLSSIKSQTIYEIIDNSQGFYVCPVEPQNRSKMNIPFRIGNAKGDDALEKRFLDKALELNMLSLKGHRSVGGIRASLYNAVTIEDVQKLAAFMKKFLEMHQL

SEQ ID NO: 803 - protein, 370 aa, synthetic construct
MDAPRQVVNFGPGPAKLPHSVLLEIQKELLDYKGVGISVLEMSHRSSDFAKIINNTENLVRELLAVPDNYKVIFLQGGGCGQFSVVPLNLIGLKAGRCADYVVTGAWSAKAAEEAKKFGTINIVHPKLGSYTKIPDPSTWNLNPDASYVYYCANETVHGVEFDFIPDVKGAVLVCDMSSNFLSKPVDVSKFGVIFAGAQKNVGSAGVTVVIVRDDLLGFALRECPSVLEYKVQAGNSSLYNTPPCFSIYVMGLVLEWIKNNGGAAAMEKLSSIKSQTIYEIIDNSQGFYVCPVEPQNRSKMNIPFRIGNAKGDDALEKRFLDKALELNMLSLKGHRSVGGIRASLYNAVTIEDVQKLAAFMKKFLEMHQL

SEQ ID NO: 804 - protein, 370 aa, synthetic construct
MDAPRQVVNFGPGPAKLPHSVLLEIQKELLDYKGVGISVLEMSHRSSDFAKIINNTENLVRELLAVPDNYKVIFLQGGGCGQFSAVPLNLIGLKAGRCADYVVTGAWSAKAAEEAKKFGTINIVPPKLGSYTKIPDPSTWNLNPDASYVYYCANETVHGVEFDFIPDVKGAVLVCDMSSNFLSKPVDVSKFGVIFAGAQKNVGSAGVTVVIVRDDLLGFALRECPSVLEYKVQAGNSSLYNTPPCFSIYVMGLVLEWIKNNGGAAAMEKLSSIKSQTIYEIIDNSQGFYVCPVEPQNRSKMNIPFRIGNAKGDDALEKRFLDKALELNMLSLKGHRSVGGIRASLYNAVTIEDVQKLAAFMKKFLEMHQL

SEQ ID NO: 805 - protein, 370 aa, synthetic construct
MDAPRQVVNFGPGPAKLPHSVLLEIQKELLDYKGVGISVLEMSHRSSDFAKIINNTENLVRELLAVPDNYKVIFLQGGGCGQFSAVPLNLIGLKAGRCADYVVTGAWSAKAAEEAKKFGTINIVHPKLGSYTKIPDPSTWNLNPDASYVYYCANETVHGVEFDFIPDVKGAVLVCDMSSNFLSKPVDVSKFGVIFAGAQKNVGSAGVTVVIVRDDLLGFALLECPSVLEYKVQAGNSSLYNTPPCFSIYVMGLVLEWIKNNGGAAAMEKLSSIKSQTIYEIIDNSQGFYVCPVEPQNRSKMNIPFRIGNAKGDDALEKRFLDKALELNMLSLKGHRSVGGIRASLYNAVTIEDVQKLAAFMKKFLEMHQL

SEQ ID NO: 806 - protein, 370 aa, synthetic construct
MDAPRQVVNFGPGPAKLPHSVLLEIQKELLDYKGVGISVLEMSHRSSDFAKIINNTENLVRELLAVPDNYKVIFLQGGGCGQFSAVPLNLIGLKAGRCADYVVTGAWSAKAAEEAKKFGTINIVHPKLGSYTKIPDPSTWNLNPDASYVYYCANETVHGVEFEFIPDVKGAVLVCDMSSNFLSKPVDVSKFGVIFAGAQKNVGSAGVTVVIVRDDLLGFALRECPSVLEYKVQAGNSSLYNTPPCFSIYVMGLVLEWIKNNGGAAAMEKLSSIKSQTIYEIIDNSQGFYVCPVEPQNRSKMNIPFRIGNAKGDDALEKRFLDKALELNMLSLKGHRSVGGIRASLYNAVTIEDVQKLAAFMKKFLEMHQL

SEQ ID NO: 807 - protein, 370 aa, synthetic construct
MDAPRQVVNFGPGPAKLPHSVLLEIQKELLDYKGVGISVLEMSHRSSDFAKIINNTENLVRELLAVPDNYKVIFLQGGGCGQFSAVPLNLIGLKAGRCADYVVTGAWSAKAAEEAKKFGTINIVHPKLGSYTKIPDPSTWNLNPDASYVYYCANETVHGVEFDFIPDVKGAVLVCDMSSNFLSKPVDVSKFGVIFAGAQKNVGSAGVTVVIVRDHLLGFALRECPSVLEYKVQAGNSSLYNTPPCFSIYVMGLVLEWIKNNGGAAAMEKLSSIKSQTIYEIIDNSQGFYVCPVEPQNRSKMNIPFRIGNAKGDDALEKRFLDKALELNMLSLKGHRSVGGIRASLYNAVTIEDVQKLAAFMKKFLEMHQL

SEQ ID NO: 808 - protein, 370 aa, synthetic construct
MDAPRQVVNFGPGPAKLPHSVLLEIQKELLDYKGVGISVLEMSHRSSDFAKIINNTENLVRELLAVPDNYKVIFLQGGGCGQFSAVPLNLIGLKAGRCADYVVTGAWSAKAAEEAKKFGTINIVHPKLGSYTKIPDPSTWNLNPDASYVYYCANETVHGVEFDFIPDVKGAVLVCDMSSNFLSKPVDVSKFGVIFAGAQKNVGSAGVTVVIVRDDLLGFALRECPSVLEYKVQAGNSSLYNTPPCFSIYVMGLVLEWIKNNGGAAAMEKLSSIKSQTIYEIIDNSQGFYVCPVEPQNRSKMNIPFRIGNAKGDDALEKRFLDKALELNMLSLEGHRSVGGIRASLYNAVTIEDVQKLAAFMKKFLEMHQL

SEQ ID NO: 809 - protein, 370 aa, synthetic construct
MDAPRQVVNFGPGPAKLPHSVLLEIQKELLDYKGVGISVLEMSHRSSDFAKIINNTENLVRELLAVPDNYKVIFLQGGGCGQFSAVPLNLIGLKAGRCADYVVTGAWSAKAAEEAKKFGTINIVHPKLWSYTKIPDPSTWNLNPDASYVYYCANETVHGVEFDFIPDVKGAVLVCDMSSNFLSKPVDVSKFGVIFAGAQKNVGSAGVTVVIVRDDLLGFALRECPSVLEYKVQAGNSSLYNTPPCFSIYVMGLVLEWIKNNGGAAAMEKLSSIKSQTIYEIIDNSQGFYVCPVEPQNRSKMNIPFRIGNAKGDDALEKRFLDKALELNMLSLKGHRSVGGIRASLYNAVTIEDVQKLAAFMKKFLEMHQL

SEQ ID NO: 810 - protein, 370 aa, synthetic construct
MDAPRQVVNFGPGPAKLPHSVLLEIQKELLDYKGVGISVLEMSHRSSDFAKIINNTENLVRELLAVPDNYKVIFLQGGGCGQFSAVPLNLIGLKAGRCADYVVTGAWSAKAAEEAKKFGTINIVHPKLGSYTKIPDPSTWNLNPDASYVYYCANETVHGVEFDFIPDVKGAVLVCDMSSNFLSKPVDVSKFGVIFAGAQKNVGSAGVTVVIVRDDLLGFALRECPSVLEYKVQAGNSSLYNTPPCFSIYVMGLVLEWIKNNGGAAAMEKLSSIKSQTIYEIIDNSQGFYVCPVEPQNRSKMNIPFRIGIAKGDDALEKRFLDKALELNMLSLKGHRSVGGIRASLYNAVTIEDVQKLAAFMKKFLEMHQL

SEQ ID NO: 811 - protein, 370 aa, synthetic construct
MDAPRQVVNFGPGPAKLPHSVLLEIQKELLDYKGVGISVLEMSHRSSDFAKIINNTENLVRELLAVPDNYKVIFLQGGGCGQFSAVPLNLIGLKAGRCADYVVTGAWSAKAAEEAKKFGTINIVHPKLGSYTKIPDPSTWNLNPDASYVYYCANETVHGVEFDFIPDVKGAVLVCDMSSNFLSKPVDVSKFGVIFAGAQKNVGSAGVTVVIVRDDLLGFALRECPSVLEYKVQAGNSSLYNTPPCFSIYVMGLVLEWIKNNGGAAAMEKLSSIKSQTIYEIIDNSQGFYVCPVEPQNRSKMNIPFRIGNAKGDDALEKRFLDKALELNMLSLKGHRSVGGIRASLYNAVTIEDVQKLAAFMKKFLEMHLL

SEQ ID NO: 812 - protein, 370 aa, synthetic construct
MDAPRQVVNFGPGPAKLPHSVLLEIQKELLDYKGVGISVLEMSHRSSDFAKIINNTENLVRELLAVPDNYKVIFLQGGGCGQFSAVPLNLIGLKAGRCADYVVTGAWSAKAAEEAKKFGTINIVHPKLGSYTKIPDPSTWNLNPDASYVYYCANETVHGVEFDFIPDVKAAVLVCDMSSNFLSKPVDVSKFGVIFAGAQKNVGSAGVTVVIVRDDLLGFALRECPSVLEYKVQAGNSSLYNTPPCFSIYVMGLVLEWIKNNGGAAAMEKLSSIKSQTIYEIIDNSQGFYVCPVEPQNRSKMNIPFRIGNAKGDDALEKRFLDKALELNMLSLKGHRSVGGIRASLYNAVTIEDVQKLAAFMKKFLEMHQL

SEQ ID NO: 813 - protein, 370 aa, synthetic construct
MDAPRQVVNFGPGPAKLPHSVLLEIQKELLDYKGVGISVLEMSHRSSDFAKIINNTENLVRELLAVPDNYKVIFLQGGGCGQFSAVPLNLIGLKAGRCADYVVTGAWSAKAAEEAKKFGTINIVHPKLGSYTKIPDPSTWNLNPDASYVYYCANETVHGVEFDFIPDVKGAVLVCDMSSNFLSKPVDVSKFGVIFAGAQKNVGSAGVTVVIVRDDLLGFALRECPSVLEYKVQAGNSSLYNTPPCFSIYVMGLVLEWIKNNGGAAAMEKLSSIKSQTIYEIIDNSQGFYVCPVEPQNRSKMNIPFCIGNAKGDDALEKRFLDKALELNMLSLKGHRSVGGIRASLYNAVTIEDVQKLAAFMKKFLEMHQL

SEQ ID NO: 814 - protein, 370 aa, synthetic construct
MDAPRQVVNFGPGPAKLPHSVLLEIQKELLDYKGVGISVLEMSHRSSDFAKIINNTENLVRELLAVPDNYKVIFLQGGGCGQFSAVPLNLIGLKAGRCADYVVTGAWSAKAAEEAKKFGTINIVHPKLGSYTKIPDPSTWNLNPDASYVYYCANETVHGVEFDFIPDVKGAVLVCDMSSNFLSKPVDVSKFGVIFAGAQKNVGSAGVTVVIVRDDLLGFALRECPSVLEYKVQAGNSSLYNTPPCFIIYVMGLVLEWIKNNGGAAAMEKLSSIKSQTIYEIIDNSQGFYVCPVEPQNRSKMNIPFRIGNAKGDDALEKRFLDKALELNMLSLKGHRSVGGIRASLYNAVTIEDVQKLAAFMKKFLEMHQL

SEQ ID NO: 815 - protein, 370 aa, synthetic construct
MDAPRQVVNFGPGPAKLPHSVLLEIQKELLDYKGVGISVLEMSHRSSDFAKIINNTENLVRELLAVPDNYKVIFLQGGGCGQFSAVPLNLIGLKAGRCADYVLTGAWSAKAAEEAKKFGTINIVHPKLGSYTKIPDPSTWNLNPDASYVYYCANETVHGVEFDFIPDVKGAVLVCDMSSNFLSKPVDVSKFGVIFAGAQKNVGSAGVTVVIVRDDLLGFALRECPSVLEYKVQAGNSSLYNTPPCFSIYVMGLVLEWIKNNGGAAAMEKLSSIKSQTIYEIIDNSQGFYVCPVEPQNRSKMNIPFRIGNAKGDDALEKRFLDKALELNMLSLKGHRSVGGIRASLYNAVTIEDVQKLAAFMKKFLEMHQL

SEQ ID NO: 816 - protein, 370 aa, synthetic construct
MDAPRQVVNFGPGPAKLRHSVLLEIQKELLDYKGVGISVLEMSHRSSDFAKIINNTENLVRELLAVPDNYKVIFLQGGGCGQFSAVPLNLIGLKAGRCADYVVTGAWSAKAAEEAKKFGTINIVHPKLGSYTKIPDPSTWNLNPDASYVYYCANETVHGVEFDFIPDVKGAVLVCDMSSNFLSKPVDVSKFGVIFAGAQKNVGSAGVTVVIVRDDLLGFALRECPSVLEYKVQAGNSSLYNTPPCFSIYVMGLVLEWIKNNGGAAAMEKLSSIKSQTIYEIIDNSQGFYVCPVEPQNRSKMNIPFRIGNAKGDDALEKRFLDKALELNMLSLKGHRSVGGIRASLYNAVTIEDVQKLAAFMKKFLEMHQL

SEQ ID NO: 817 - protein, 370 aa, synthetic construct
MDAPRQVVNFGPGPAKLPHSVLLEIQKELLDYKGVGISVLEMSHRSSDFAKIINNTENLVRELLAVPDNYKVIFLQGGGCGQFSAVPLNLIGLKAGRCADYVVTGAWSAKAAEEAKKFGTINIVHPKLGSYTKIPDPSTWNLNPDASYVYYCANETVHGVEFDFIPDVKGAVLVCDMSSNFLSKPVDVSKFGVIFAGAQKNVGSAGVTVVIVRDDLLGFALRECPSVLEYKVQAGNSSLYNTPPCFSIYVMGLVLEWIKNNGGAAAMEKLSSIKSQTIYEIIDNSQGFYVCPVEPQNRSKMNIPFRIGNAKGDDALEKRFLDKALELNMLSLKGHRSVGGIRASLYHAVTIEDVQKLAAFMKKFLEMHQL

SEQ ID NO: 818 - protein, 370 aa, synthetic construct
MDAPRQVVNFGPGPAKLPHSVLLEIQKELLDYKGVGISVLEMSHRSSDFAKIINNTGNLVRELLAVPDNYKVIFLQGGGCGQFSAVPLNLIGLKAGRCADYVVTGAWSAKAAEEAKKFGTINIVHPKLGSYTKIPDPSTWNLNPDASYVYYCANETVHGVEFDFIPDVKGAVLVCDMSSNFLSKPVDVSKFGVIFAGAQKNVGSAGVTVVIVRDDLLGFALRECPSVLEYKVQAGNSSLYNTPPCFSIYVMGLVLEWIKNNGGAAAMEKLSSIKSQTIYEIIDNSQGFYVCPVEPQNRSKMNIPFRIGNAKGDDALEKRFLDKALELNMLSLKGHRSVGGIRASLYNAVTIEDVQKLAAFMKKFLEMHQL

SEQ ID NO: 819 - protein, 370 aa, synthetic construct
MDAPRQVVNFGPGPAKLPHSVLLEMQKELLDYKGVGISVLEMSHRSSDFAKIINNTENLVRELLAVPDNYKVIFLQGGGCGQFSAVPLNLIGLKAGRCADYVVTGAWSAKAAEEAKKFGTINIVHPKLGSYTKIPDPSTWNLNPDASYVYYCANETVHGVEFDFIPDVKGAVLVCDMSSNFLSKPVDVSKFGVIFAGAQKNVGSAGVTVVIVRDDLLGFALRECPSVLEYKVQAGNSSLYNTPPCFSIYVMGLVLEWIKNNGGAAAMEKLSSIKSQTIYEIIDNSQGFYVCPVEPQNRSKMNIPFRIGNAKGDDALEKRFLDKALELNMLSLKGHRSVGGIRASLYNAVTIEDVQKLAAFMKKFLEMHQL

SEQ ID NO: 820 - protein, 370 aa, synthetic construct
MDAPRQVVNFGPGPAKLPHSVLLEIQKELLDYKGVGISVLEMSHRSSDFAKIINNTENLVRELLAVPDNYKVIFLQGGGCGQFSAVPLNLIGLKAGRCADYVVTGAWSAKAAEEAKKFGTINIVHPKLGSYTKIPDPSTWNLNPDASYVYYCANETVHGVEFDFIPDVKGAVLVCDMSSNFLSKPVDVSKFGVIFAGAQKNVGSAGVTVVIVRDDLLGFALRECPSVLEYKVQAGNSSLYNTPSCFSIYVMGLVLEWIKNNGGAAAMEKLSSIKSQTIYEIIDNSQGFYVCPVEPQNRSKMNIPFRIGNAKGDDALEKRFLDKALELNMLSLKGHRSVGGIRASLYNAVTIEDVQKLAAFMKKFLEMHQL

SEQ ID NO: 821 - protein, 370 aa, synthetic construct
MDAPRQVVNFGPGPAKLPHSVLLEIQKELLDYKGVGISVLEMSHRSSDFAKIINNTENLVRELLAVPDNYKVIFLQGGGCGQFSAVPLNLIGLKAGRCADYVVTGAWSAKAAEEAKKFGTINIVHPKLGSYTKIPDPSTWNLNPDASYVYYCANETVHGVEFDFIPDVKGAVLVCDMSSNFLSKPVDVSKFGVIFAGAQKNVGSAGVTVVIVRDDLLGFALRECPSVLEYKVQAGNSSLYNTPPCFSIYVMGLVLEGIKNNGGAAAMEKLSSIKSQTIYEIIDNSQGFYVCPVEPQNRSKMNIPFRIGNAKGDDALEKRFLDKALELNMLSLKGHRSVGGIRASLYNAVTIEDVQKLAAFMKKFLEMHQL

SEQ ID NO: 822 - protein, 370 aa, synthetic construct
MDAPRQVVNFGPGPAKLPHSVLLEIQKELLDYKGVGISVLEMSHRSSDFAKIINNTENLVRELLAVPDNYKVIFLQGGGCGQFSAVPLNLIGLKAGRCADYVVTGAWSAKAAEEAKKFGTINIVHPKLGSYTKIPDPSTWNLNPDASYVYYCANETVHGVEFDFIPDVKGAVLVCDMSSNFLSKPVDVSKFGVIFAGAQKNVGSAGVTVVIVRDDLLGFALRECPSVLEYKVQAGNSSLYNTPPCFSIYVMGLVLEWIKNNGGAAAMEKLSSIKSQTIYEIIDNSQGFYVCPVEPQNRSKMNIPFRIGNAKGDDALEKRFLDKAHELNMLSLKGHRSVGGIRASLYNAVTIEDVQKLAAFMKKFLEMHQL

SEQ ID NO: 823 - protein, 370 aa, synthetic construct
MDAPRQVVNFGPGPAKLPHSVLLEIQKELLDYKGVGISVLEMSHRSSDFAKIINNTENLVRELLAVPDNYKVIFLQGGGCGQFSAVPLNLIGLKAGRCADYVVTGAWSAKAAEEAKKFGTINIVHPKLGSYTKIPDPSTWNLNPDASYVYYCANETVHGVEFDFIPDVKGAVLVCDMSSNFLSKPVDVSKFGVIFAGAQKNVGSAGVTVVIVRDDLLGFALRECPSVLEYKVQAGNSSLYNTPPCFSIYVMGLVLEWIKNNGGAAAMEKLSSSKSQTIYEIIDNSQGFYVCPVEPQNRSKMNIPFRIGNAKGDDALEKRFLDKALELNMLSLKGHRSVGGIRASLYNAVTIEDVQKLAAFMKKFLEMHQL

SEQ ID NO: 824 - protein, 370 aa, synthetic construct
MDAPRQVVNFGPGPAKLPHSVLLEIQKELLDYKGVGISVLEMSHRSSDFAKIINNTENLVRELLAVPDNYKVIFLQGGGCGQFSAVPLNLIGLKAGRCADYVVTGAWSAKAAEEAKKFGTINVVHPKLGSYTKIPDPSTWNLNPDASYVYYCANETVHGVEFDFIPDVKGAVLVCDMSSNFLSKPVDVSKFGVIFAGAQKNVGSAGVTVVIVRDDLLGFALRECPSVLEYKVQAGNSSLYNTPPCFSIYVMGLVLEWIKNNGGAAAMEKLSSIKSQTIYEIIDNSQGFYVCPVEPQNRSKMNIPFRIGNAKGDDALEKRFLDKALELNMLSLKGHRSVGGIRASLYNAVTIEDVQKLAAFMKKFLEMHQL

SEQ ID NO: 825 - protein, 370 aa, synthetic construct
MDAPRQVVNFGPGPAKLPHSVLLEIQKELLDYKGVGISVLEMSHRSSDFAKIINNTENLVRELLAVPDNYKVIFLQGGGCGQFSAVPLNLIGLKAGRCADYVVTGAWSAKAAEEAKKFGTINIVHPKLGSYTKIPDPSTWNLNPDASYVYYCANETVHGVEFDFIPDVKGAVLVCDMSSNFLSKPVDVSKFGVIFAGAQKNVGSAGVTVVIVRDDLLGFALRECPSVLEYKVQAGNSSLYNTPPCFSIYVMGLVLEWIKNNGGAAAMEKLSSIKSQTIYEIIDNSQGFYVCPVEPQNRSEMNIPFRIGNAKGDDALEKRFLDKALELNMLSLKGHRSVGGIRASLYNAVTIEDVQKLAAFMKKFLEMHQL

SEQ ID NO: 826 - protein, 370 aa, synthetic construct
MDAPRQVVNFGPGPAKLPHSVLLEIQKELLDYKGVGISVLEMSHRSSDFAKISNNTENLVRELLAVPDNYKVIFLQGGGCGQFSAVPLNLIGLKAGRCADYVVTGAWSAKAAEEAKKFGTINIVHPKLGSYTKIPDPSTWNLNPDASYVYYCANETVHGVEFDFIPDVKGAVLVCDMSSNFLSKPVDVSKFGVIFAGAQKNVGSAGVTVVIVRDDLLGFALRECPSVLEYKVQAGNSSLYNTPPCFSIYVMGLVLEWIKNNGGAAAMEKLSSIKSQTIYEIIDNSQGFYVCPVEPQNRSKMNIPFRIGNAKGDDALEKRFLDKALELNMLSLKGHRSVGGIRASLYNAVTIEDVQKLAAFMKKFLEMHQL

SEQ ID NO: 827 - protein, 370 aa, synthetic construct
MDAPRQVVNFGPGPAKLPHSVLLEIQKELLDYKGVGISVLEMSHRSSDFAKIINNTENLVRELLAVPDNYKVIFLQGGGCGLFSAVPLNLIGLKAGRCADYVVTGAWSAKAAEEAKKFGTINIVHPKLGSYTKIPDPSTWNLNPDASYVYYCANETVHGVEFDFIPDVKGAVLVCDMSSNFLSKPVDVSKFGVIFAGAQKNVGSAGVTVVIVRDDLLGFALRECPSVLEYKVQAGNSSLYNTPPCFSIYVMGLVLEWIKNNGGAAAMEKLSSIKSQTIYEIIDNSQGFYVCPVEPQNRSKMNIPFRIGNAKGDDALEKRFLDKALELNMLSLKGHRSVGGIRASLYNAVTIEDVQKLAAFMKKFLEMHQL

SEQ ID NO: 828 - protein, 370 aa, synthetic construct
MDAPRQVVNFGPGPAKLPHSVLLEIQKELLDYKGVGISVLEMSHRSSDFAKIINNTENLVRELLAVPDNYKVIFLQGGGCGQFSAVPLNLIGLKAGRCADYVVTGAWSAKAAEEAKKFGTINIVHPKLGSYTKIPDPSTWNLNPDASYVYYCANETVHGVEFDFIPDVKGAVLVCDMSSNFLSKPVDVSKFGVIFAGAQKNVGSAGVTVVIVRDDLLGFALRECPSVLEYKVQAGNSSLYNTPPCFSIYVMGLVLEWIKNNGGAAAMEKLSSIKSQTIYEIIDNSQGFYVCPVEPQNRSKMNIPFRIGNAKGDDALEKRFLDKALEHNMLSLKGHRSVGGIRASLYNAVTIEDVQKLAAFMKKFLEMHQL

SEQ ID NO: 829 - protein, 370 aa, synthetic construct
MDAPRQVVNFGPGPAKLPHSVLLEIQKELLDYKGVGISVLEMSHRSSDFAKIINNTENLVRELLAVPDNYKVIFLQGGGCGQFSAVPLNLIGLKAGRCADYVVTGAWSAKAAEEAKKFGTINIVHPKLGSYTKIPDPSTWNLNPDASYVYYCANETVHGVEFDFIPDVKGAVLVCDMSSNFLSKPVDVSKFGVIFAGAQKNVGSAGVTVVIVRDDLLGFALRECPSVLEYKVQAGNSSLYNTPPCFSIYVMGLVLEWIKNNGGAAAMEKRSSIKSQTIYEIIDNSQGFYVCPVEPQNRSKMNIPFRIGNAKGDDALEKRFLDKALELNMLSLKGHRSVGGIRASLYNAVTIEDVQKLAAFMKKFLEMHQL

SEQ ID NO: 830 - protein, 370 aa, synthetic construct
MDAPRQVVNFGPGPAKLPHSVLLEIQKELLDYKGVVISVLEMSHRSSDFAKIINNTENLVRELLAVPDNYKVIFLQGGGCGQFSAVPLNLIGLKAGRCADYVVTGAWSAKAAEEAKKFGTINIVHPKLGSYTKIPDPSTWNLNPDASYVYYCANETVHGVEFDFIPDVKGAVLVCDMSSNFLSKPVDVSKFGVIFAGAQKNVGSAGVTVVIVRDDLLGFALRECPSVLEYKVQAGNSSLYNTPPCFSIYVMGLVLEWIKNNGGAAAMEKLSSIKSQTIYEIIDNSQGFYVCPVEPQNRSKMNIPFRIGNAKGDDALEKRFLDKALELNMLSLKGHRSVGGIRASLYNAVTIEDVQKLAAFMKKFLEMHQL

SEQ ID NO: 831 - protein, 370 aa, synthetic construct
MDAPRQVVNFGPGPAKLPHSVLLEIQKELLDYKGVGISVLEMSHRSSDFAKIINNTENLVRELLAVPDNYKVIFLQGGGCGQFSAVPLNLIGLKAGRCADYVVTGAWSAKAAEEAKKFGTINIVHPKLGSYTKIPDPSTWNLNPDASYVYYCANETVHGVEFDFIPDVKGAVLVCDMSSNFLSKPVDVSKFGVIFAGAQKNVGSAGVTVVIVRDDLLGFALRECPSVLEYKVQAGNSSLYNTPPCFSIYVMGLVLEWIKNNGGAAVMEKLSSIKSQTIYEIIDNSQGFYVCPVEPQNRSKMNIPFRIGNAKGDDALEKRFLDKALELNMLSLKGHRSVGGIRASLYNAVTIEDVQKLAAFMKKFLEMHQL

SEQ ID NO: 832 - protein, 370 aa, synthetic construct
MDAPRQVVNFGPGPAKLPHSMLLEIQKELLDYKGVGISVLEMSHRSSDFAKIINNTENLVRELLAVPDNYKVIFLQGGGCGQFSAVPLNLIGLKAGRCADYVVTGAWSAKAAEEAKKFGTINIVHPKLGSYTKIPDPSTWNLNPDASYVYYCANETVHGVEFDFIPDVKGAVLVCDMSSNFLSKPVDVSKFGVIFAGAQKNVGSAGVTVVIVRDDLLGFALRECPSVLEYKVQAGNSSLYNTPPCFSIYVMGLVLEWIKNNGGAAAMEKLSSIKSQTIYEIIDNSQGFYVCPVEPQNRSKMNIPFRIGNAKGDDALEKRFLDKALELNMLSLKGHRSVGGIRASLYNAVTIEDVQKLAAFMKKFLEMHQL

SEQ ID NO: 833 - protein, 370 aa, synthetic construct
MDAPRQVVNFGPGPAKLPHSVLLEIQKELLDYKGVGISVLEMSHRSSDFAKIINNTENLVRELLAVPDNYKVIFLQGGGCGQFSAVPLNLIGLKAGRCADYVVTGAWSAKAAEEAKKFGTINIVHPKLGSYTKIPDPSTWNLNPDASYVYYCANETVHGVEFDFIPDVKGAVLVCDMSSNFLSKPVDVSKFGVIFAGAQKNVGSAGVTVVIVRDDLLGFALRECPSVLEYKVQAGNSSLYNTPPCFSIYVMGLVLEWIKNNGGAAAMEKLSSIKSQTIYEIVDNSQGFYVCPVEPQNRSKMNIPFRIGNAKGDDALEKRFLDKALELNMLSLKGHRSVGGIRASLYNAVTIEDVQKLAAFMKKFLEMHQL

SEQ ID NO: 834 - protein, 370 aa, synthetic construct
MDAPRQVVNFGPGPAKLPHSVLLEIQKELLDYKGVGISVLEMSHRSSDFAKIINNTENLVRELLAVPDNYKVIFLQGGGCGQFSAVPLNLIGLKAGRCADYVVTGAWSAKAAEEAKKFGTINIVHPKLGSYTKIPDPSTWNLNPDASYVYYCANETVHGVEFDFIPDVKGAVLVCDMSSNFLSKPVDVSKFGVIFAGAQKNVGSAGVTVVIVRDDLLGFALRECPSVLEYKVQAGNSSLYNTPPCFSIYVMGLVLEWIKNNGGAAAMEKLSSIKSQTIYEIIDNSQGFYVCPVEPQNRSMMNIPFRIGNAKGDDALEKRFLDKALELNMLSLKGHRSVGGIRASLYNAVTIEDVQKLAAFMKKFLEMHQL

SEQ ID NO: 835 - protein, 370 aa, synthetic construct
MDAPRQVVNFGPGPAKLPHSVLLEIQKELLDYKGVGISVLEMSHRSSDFAKIINNTENLVRELLAVPDNYKVIFLQGGGCGQFSAVPLNLIGLKAGRCADYVVTGAWSAKAAEEAKKFGTINIVHPKLGSYTKIPDPSTWNLNPDASYVYYCANETVHGVEFDFIPDVKGAVLVCDMSSNFLSKPVDVSKFGVIFAGAQKNVGSAGVTVVIVRDDLLGFALRECPSVLEYKVQAGNSSLYNTPPCFSIYVMGLVLEWIKNNGGAAAMEKLGSIKSQTIYEIIDNSQGFYVCPVEPQNRSKMNIPFRIGNAKGDDALEKRFLDKALELNMLSLKGHRSVGGIRASLYNAVTIEDVQKLAAFMKKFLEMHQL

SEQ ID NO: 836 - protein, 370 aa, synthetic construct
MDAPRQVVNFGPGPAKLPHSVLLEIQKELLDYKGVGISVLEMSHRSSDFAKIINNTENLVRELLAVPDNYKVIFLQGGGCGQFSAVPLNLIGLKAGRCADYVVTGAWSAKAAEEAKKFGTINIVHPKLGSYTKIPDPSTWNLNPDASYVYYCANETVHGVEFDFIPDVKGAVLVCDMSSNFLSKPVDVPKFGVIFAGAQKNVGSAGVTVVIVRDDLLGFALRECPSVLEYKVQAGNSSLYNTPPCFSIYVMGLVLEWIKNNGGAAAMEKLSSIKSQTIYEIIDNSQGFYVCPVEPQNRSKMNIPFRIGNAKGDDALEKRFLDKALELNMLSLKGHRSVGGIRASLYNAVTIEDVQKLAAFMKKFLEMHQL

SEQ ID NO: 837 - protein, 370 aa, synthetic construct
MDAPRQVVNFGPGPAKLPHSVLLEIQKELLDYKGVGISVLEMSHRSSDFGKIINNTENLVRELLAVPDNYKVIFLQGGGCGQFSAVPLNLIGLKAGRCADYVVTGAWSAKAAEEAKKFGTINIVHPKLGSYTKIPDPSTWNLNPDASYVYYCANETVHGVEFDFIPDVKGAVLVCDMSSNFLSKPVDVSKFGVIFAGAQKNVGSAGVTVVIVRDDLLGFALRECPSVLEYKVQAGNSSLYNTPPCFSIYVMGLVLEWIKNNGGAAAMEKLSSIKSQTIYEIIDNSQGFYVCPVEPQNRSKMNIPFRIGNAKGDDALEKRFLDKALELNMLSLKGHRSVGGIRASLYNAVTIEDVQKLAAFMKKFLEMHQL

SEQ ID NO: 838 - protein, 370 aa, synthetic construct
MDAPRQVVNFGPGPAKLPHSVLLEIQKELLDYKGVGISVLEMSHRSSDFAKIINNTENLVRELLAVPDNYKVIFLQGGGCGQFSAVPLNLIGLKAGRCADYVVTGAWSAKAAEEAKKFGTINIVHPKLGSYTKIPDPSTWNLNPDASYVYYCANETVHGVEFDFIPDVKGAVLVCDMSSNFLSKPVDVSKFGVIFAGAQKNVGSAGVTVVIVRDDLLGFALRESPSVLEYKVQAGNSSLYNTPPCFSIYVMGLVLEWIKNNGGAAAMEKLSSIKSQTIYEIIDNSQGFYVCPVEPQNRSKMNIPFRIGNAKGDDALEKRFLDKALELNMLSLKGHRSVGGIRASLYNAVTIEDVQKLAAFMKKFLEMHQL

SEQ ID NO: 839 - protein, 370 aa, synthetic construct
MDAPRQVVNFGPGPAKLPHSVLLEIQKELLDYKGVGISVLEMSHRSSDFAKIINNTENLVRELLAVPDNYKVIFLQGGGCGQFSAVPLNLIGLKAGRCADYVVTGAWSAKAAEEAKKFGTINILHPKLGSYTKIPDPSTWNLNPDASYVYYCANETVHGVEFDFIPDVKGAVLVCDMSSNFLSKPVDVSKFGVIFAGAQKNVGSAGVTVVIVRDDLLGFALRECPSVLEYKVQAGNSSLYNTPPCFSIYVMGLVLEWIKNNGGAAAMEKLSSIKSQTIYEIIDNSQGFYVCPVEPQNRSKMNIPFRIGNAKGDDALEKRFLDKALELNMLSLKGHRSVGGIRASLYNAVTIEDVQKLAAFMKKFLEMHQL

SEQ ID NO: 840 - protein, 370 aa, synthetic construct
MDAPRQVVNFGPGPAKLPHSVLLEIQKELLDYKGVGISVLEMSHRSSDFAKLINNTENLVRELLAVPDNYKVIFLQGGGCGQFSAVPLNLIGLKAGRCADYVVTGAWSAKAAEEAKKFGTINIVHPKLGSYTKIPDPSTWNLNPDASYVYYCANETVHGVEFDFIPDVKGAVLVCDMSSNFLSKPVDVSKFGVIFAGAQKNVGSAGVTVVIVRDDLLGFALRECPSVLEYKVQAGNSSLYNTPPCFSIYVMGLVLEWIKNNGGAAAMEKLSSIKSQTIYEIIDNSQGFYVCPVEPQNRSKMNIPFRIGNAKGDDALEKRFLDKALELNMLSLKGHRSVGGIRASLYNAVTIEDVQKLAAFMKKFLEMHQL

SEQ ID NO: 841 - protein, 370 aa, synthetic construct
MDAPRQVVNFGPGPAKLPHSVLLEIQKELLDYKGVGISVLEMSHRSSDFAKIINNTENLVRELLAVPDNYKVIFLQGGGCGQFSAVPLNLIGLKAGRCADYVVTGAWSAKAAEEAKKFGTINIVHPKLGSYTKIPDPSTWNLNPDASYVYYCANETVHGVEFDFIPDVKGAVLVCDMSSNFLSKPVDVSKFGVIFAGAQKNVGSAGVTVVIVRDDLLGFALRECPSVLEYKVQAGNSSLYNTPPCFSIYVMGLVLEWIKNNGGAAAMEKLSSIKSQAIYEIIDNSQGFYVCPVEPQNRSKMNIPFRIGNAKGDDALEKRFLDKALELNMLSLKGHRSVGGIRASLYNAVTIEDVQKLAAFMKKFLEMHQL

SEQ ID NO: 842 - protein, 370 aa, synthetic construct
MDAPRQVVNFGPGPAKLPHSVLLEIQKELLDYKGVGISVLEMSHRSSDFAKIINNTENLVRQLLAVPDNYKVIFLQGGGCGQFSAVPLNLIGLKAGRCADYVVTGAWSAKAAEEAKKFGTINIVHPKLGSYTKIPDPSTWNLNPDASYVYYCANETVHGVEFDFIPDVKGAVLVCDMSSNFLSKPVDVSKFGVIFAGAQKNVGSAGVTVVIVRDDLLGFALRECPSVLEYKVQAGNSSLYNTPPCFSIYVMGLVLEWIKNNGGAAAMEKLSSIKSQTIYEIIDNSQGFYVCPVEPQNRSKMNIPFRIGNAKGDDALEKRFLDKALELNMLSLKGHRSVGGIRASLYNAVTIEDVQKLAAFMKKFLEMHQL

SEQ ID NO: 843 - protein, 370 aa, synthetic construct
MDAPRQVVNFGPGPAKLPHSVLLEIQKELLDYKGVGISVLEMSHRSSDFAKIINNTENLVRELLAVPDNYKVIFLQGGGCGQFSAVPLNLIGLKAGRCADYVVTGAWSAKAAEEAKKFGTINIVHPKLGSYTKIPDPSTWNLNPDASYVYYCANETVHGVEFDFIPDVKGAVLVCDMSSNFLSKPVDVSKFGVIFAGAQKNVGSAGVTVVIVRDDLLGFALRECPSVLEYKVQAGNSSLYNTPPCFSIYVMGLVLEWIKNNGGAAAMEKLSSIKSQTIYEIIDNSQGFYVCPVEPQNRSKMNIPFRIGNAKGDDALEKRFLDQALELNMLSLKGHRSVGGIRASLYNAVTIEDVQKLAAFMKKFLEMHQL

SEQ ID NO: 844 - protein, 370 aa, synthetic construct
MDAPRQVVNFGPGPAKLPHSVLLEIQKELLDYKGVGISVLEMSHRSSDFAKIINNTENLVRELLAVPDNYKVIFLQGGGCGQFSAVPLNLIGLKAGRCADYVVTGAWSAKAAEEAKKFGTINIVHPKLGSYTKIPDPSTWNLNPDASYVYYCANETVHGVEFDFIPDVKGAVLVCDMSSNFLSKPVDVSKFGVIFAGAQKNVGSAGVTVVIVRDDLLGFALRECPSVLEYKVQAGNSSLYNTPPCFSIYVMGLVLEWIKNNGGAAAMEKLSSIKSQTIYEIIDNSQGFYVCPVEPQNRSKMNIPFRIGNAKGYDALEKRFLDKALELNMLSLKGHRSVGGIRASLYNAVTIEDVQKLAAFMKKFLEMHQL

SEQ ID NO: 845 - protein, 370 aa, synthetic construct
MDAPRQVVNFGPGPAKLPHSVLLEIQKELLDYKGVGISVLEMSHRSSDFAKIINNTENLVRELLAVPDNYKVIFLQGGGCGQFSAVPLNLIGLKAGRCADYVVTGAWSAKAAEEAKKFGTINIVHPKLGSYTKIPDPSTWNLNPDASYVYYCANETVHGVEFDFIPDVKGSVLVCDMSSNFLSKPVDVSKFGVIFAGAQKNVGSAGVTVVIVRDDLLGFALRECPSVLEYKVQAGNSSLYNTPPCFSIYVMGLVLEWIKNNGGAAAMEKLSSIKSQTIYEIIDNSQGFYVCPVEPQNRSKMNIPFRIGNAKGDDALEKRFLDKALELNMLSLKGHRSVGGIRASLYNAVTIEDVQKLAAFMKKFLEMHQL

SEQ ID NO: 846 - protein, 370 aa, synthetic construct
MDAPRQVVNFGPGPAKLPHSVLLEIQKELLDYKGVGISVLEMSHRSSDFAKIINNTENLVRELLAVPDNYKVIFLQGGGCGQFSAVPLNLIGLKAGRCADYVVTGAWSAKAAEEAKKFGTINIVHPKLGSYTKIPDPSTWNLNPDASYVYYCANETVHGVEFDFIPDVKGAVLVCDMSSNFLSKPVDVSKFGVIFAGAQKNVGSAGVTVVIVRDDLLGFALRECPSVLEYKVQAGNSSLYNTPPCFSIYVMGLVLEWIKNNGGAAAMEKLSSIKSQTIYEIIDNSQGFYVCPVEPQNRSKMNIPFRIGNAKGDDALEKRFLDKALELKMLSLKGHRSVGGIRASLYNAVTIEDVQKLAAFMKKFLEMHQL

SEQ ID NO: 847 - protein, 370 aa, synthetic construct
MDAPRQVVNFGPGPAKLPHSVLLEIQKELLDYKGVGISVLEMSHRSSDFAKTINNTENLVRELLAVPDNYKVIFLQGGGCGQFSAVPLNLIGLKAGRCADYVVTGAWSAKAAEEAKKFGTINIVHPKLGSYTKIPDPSTWNLNPDASYVYYCANETVHGVEFDFIPDVKGAVLVCDMSSNFLSKPVDVSKFGVIFAGAQKNVGSAGVTVVIVRDDLLGFALRECPSVLEYKVQAGNSSLYNTPPCFSIYVMGLVLEWIKNNGGAAAMEKLSSIKSQTIYEIIDNSQGFYVCPVEPQNRSKMNIPFRIGNAKGDDALEKRFLDKALELNMLSLKGHRSVGGIRASLYNAVTIEDVQKLAAFMKKFLEMHQL

SEQ ID NO: 848 - protein, 370 aa, synthetic construct
MDAPRQVVNFGPGPAKLPHSVLLEIQKELLDYKGVGISVLEMSHRSSDFAKIINNTENLVRELLAVPDNYKVIFLQGGGCGQFSAVPLNLIGLKAGRCADYVVTGAWSAKAAEEAKKFGTINIVHPKLGSYTKIPDPSTWNLNPDASYVYYCANETVHGVEFDFMPDVKGAVLVCDMSSNFLSKPVDVSKFGVIFAGAQKNVGSAGVTVVIVRDDLLGFALRECPSVLEYKVQAGNSSLYNTPPCFSIYVMGLVLEWIKNNGGAAAMEKLSSIKSQTIYEIIDNSQGFYVCPVEPQNRSKMNIPFRIGNAKGDDALEKRFLDKALELNMLSLKGHRSVGGIRASLYNAVTIEDVQKLAAFMKKFLEMHQL

SEQ ID NO: 849 - protein, 370 aa, synthetic construct
MDAPRQVVNFGPGPAKLPHSVLLEIQQELLDYKGVGISVLEMSHRSSDFAKIINNTENLVRELLAVPDNYKVIFLQGGGCGQFSAVPLNLIGLKAGRCADYVVTGAWSAKAAEEAKKFGTINIVHPKLGSYTKIPDPSTWNLNPDASYVYYCANETVHGVEFDFIPDVKGAVLVCDMSSNFLSKPVDVSKFGVIFAGAQKNVGSAGVTVVIVRDDLLGFALRECPSVLEYKVQAGNSSLYNTPPCFSIYVMGLVLEWIKNNGGAAAMEKLSSIKSQTIYEIIDNSQGFYVCPVEPQNRSKMNIPFRIGNAKGDDALEKRFLDKALELNMLSLKGHRSVGGIRASLYNAVTIEDVQKLAAFMKKFLEMHQL

SEQ ID NO: 850 - protein, 370 aa, synthetic construct
MDAPRQVVNFGPGPARLPHSVLLEIQKELLDYKGVGISVLEMSHRSSDFAKIINNTENLVRELLAVPDNYKVIFLQGGGCGQFSAVPLNLIGLKAGRCADYVVTGAWSAKAAEEAKKFGTINIVHPKLGSYTKIPDPSTWNLNPDASYVYYCANETVHGVEFDFIPDVKGAVLVCDMSSNFLSKPVDVSKFGVIFAGAQKNVGSAGVTVVIVRDDLLGFALRECPSVLEYKVQAGNSSLYNTPPCFSIYVMGLVLEWIKNNGGAAAMEKLSSIKSQTIYEIIDNSQGFYVCPVEPQNRSKMNIPFRIGNAKGDDALEKRFLDKALELNMLSLKGHRSVGGIRASLYNAVTIEDVQKLAAFMKKFLEMHQL

SEQ ID NO: 851 - protein, 370 aa, synthetic construct
MDAPRQVVNFGPGPAKLPHSVLLGIQKELLDYKGVGISVLEMSHRSSDFAKIINNTENLVRELLAVPDNYKVIFLQGGGCGQFSAVPLNLIGLKAGRCADYVVTGAWSAKAAEEAKKFGTINIVHPKLGSYTKIPDPSTWNLNPDASYVYYCANETVHGVEFDFIPDVKGAVLVCDMSSNFLSKPVDVSKFGVIFAGAQKNVGSAGVTVVIVRDDLLGFALRECPSVLEYKVQAGNSSLYNTPPCFSIYVMGLVLEWIKNNGGAAAMEKLSSIKSQTIYEIIDNSQGFYVCPVEPQNRSKMNIPFRIGNAKGDDALEKRFLDKALELNMLSLKGHRSVGGIRASLYNAVTIEDVQKLAAFMKKFLEMHQL

SEQ ID NO: 852 - protein, 370 aa, synthetic construct
MDAPRQVVNFGPGPAKLPHSVLLEIQKELLDYKGVGISVLEMSHRSSDFAKIINNTENLVRELLAVPDNYKVIFLQGGGCGQFSAVPLNLIGLKAGRCADYVVTGAWSAKAAEEAKKFGTINIVHPKLGSYTKIPDPSTWNLNPDASYVYYCANETVHGVEFDFIPDVKGAVLVCDMSSNFLSKPVDVSKFGVIFAGAQKNVGSAGVTVVIVRDDLLGFALRECPSVLEYKVQAGNSSLYNTPPCFSIYVMGLVLEWIKNNGGAAAMEKLSSIKSQTIYEIIDNSQGYYVCPVEPQNRSKMNIPFRIGNAKGDDALEKRFLDKALELNMLSLKGHRSVGGIRASLYNAVTIEDVQKLAAFMKKFLEMHQL

SEQ ID NO: 853 - protein, 370 aa, synthetic construct
MDAPRQVVNFGPGPAKLPHSVLLEIQKELLDYKGVGISVLEMSHRSSDFAKIINNTENLVRELLAVPDNYKVIFLQGGGCGQFSAVPLNLIGLKAGRCADYVVTGAWSAKAAEEAKKFGTINIVHPKLGSYTKIPDPSTWNLNPDASYVYYCANETVHGVEFDFIPDVKGAVLVCDMSSNFLSKPVDVSKFGVIFAGAQKNVGSAGVTVVIVRDDLLGFALRECPSVLEYKVQAGNSSLYNTPPCFSIYVMGLVQEWIKNNGGAAAMEKLSSIKSQTIYEIIDNSQGFYVCPVEPQNRSKMNIPFRIGNAKGDDALEKRFLDKALELNMLSLKGHRSVGGIRASLYNAVTIEDVQKLAAFMKKFLEMHQL

SEQ ID NO: 854 - protein, 370 aa, synthetic construct
MDAPRQVVNFGPGPAKLPHSVLLEIQKELLDYKGVGISVLEMSHRSSDFAKIINNTENLVRELLAVPDNYKVIFLQGGGCGQFSAVPLNLIGLKAGRCADYVVTGAWSAKAAEEAKKFGTINIVHPKLGSYTKIPDPSTWNLNPDASYVYYCANETVHGVEFDFIPDVKGAVLVCDMSSNFLSKPVDVSKFGVIFAGAQKNVGSAGVTVVIVRDDLLGFTLRECPSVLEYKVQAGNSSLYNTPPCFSIYVMGLVLEWIKNNGGAAAMEKLSSIKSQTIYEIIDNSQGFYVCPVEPQNRSKMNIPFRIGNAKGDDALEKRFLDKALELNMLSLKGHRSVGGIRASLYNAVTIEDVQKLAAFMKKFLEMHQL

SEQ ID NO: 855 - protein, 370 aa, synthetic construct
MDAPRQVVNFGPGPAKLPHSVLLEIQKELLDYKGVGISVLEMSHRSSDFAKIINNTENLVRELLAVPDNYKVIFLQGGGCGQFSAVPLNLIGLKAGRCADYVVTGAWSAKAAEEAKKFGTINIVHPKLGSYTKIPDPSTWNLNPDASYVYYCANETVHGVEFDFIPDVKGAVLVCDMSSNFLSKPVDVSKFGVICAGAQKNVGSAGVTVVIVRDDLLGFALRECPSVLEYKVQAGNSSLYNTPPCFSIYVMGLVLEWIKNNGGAAAMEKLSSIKSQTIYEIIDNSQGFYVCPVEPQNRSKMNIPFRIGNAKGDDALEKRFLDKALELNMLSLKGHRSVGGIRASLYNAVTIEDVQKLAAFMKKFLEMHQL

SEQ ID NO: 856 - protein, 370 aa, synthetic construct
MDAPRQVVNFGPGPAKLPHSVLLEIQKELLDYKGVGISVLEMSHRSSDFAKIINNTENLVRELLAVPDNYKVIFLQGGGCGQFSAVPLNLIGLKAGRCADYVVTGAWSAKAAEEAKKFGTINIVHPKLGSYRKIPDPSTWNLNPDASYVYYCANETVHGVEFDFIPDVKGAVLVCDMSSNFLSKPVDVSKFGVIFAGAQKNVGSAGVTVVIVRDDLLGFALRECPSVLEYKVQAGNSSLYNTPPCFSIYVMGLVLEWIKNNGGAAAMEKLSSIKSQTIYEIIDNSQGFYVCPVEPQNRSKMNIPFRIGNAKGDDALEKRFLDKALELNMLSLKGHRSVGGIRASLYNAVTIEDVQKLAAFMKKFLEMHQL

SEQ ID NO: 857 - protein, 370 aa, synthetic construct
MDAPRQVVNFGPGPAKLPHSVLLEIQKELLDYKGVGISVLEMSHRSSDFAKIINNTENLVRELLAVPDNYKVIFLQGGGCGQFSAVPLNLIGLKAGRCADYVVTGAWSAKAAEEAKKFGTINIVHPKLGSYTKIPDPSTWNLNPDASYVYYCANETVHGVEFDFIPDVKGAVLVCDMSSNFLSKPVDVSKFGVIFAGAQKNVGSAGVTVVIVRDDLLGFALRECPSVLEYKVQAGNSSLYNTPPCFSIYVMGLVLEWIKNNGGAAAMEKLSSIKSQTIYEIIDNSRGFYVCPVEPQNRSKMNIPFRIGNAKGDDALEKRFLDKALELNMLSLKGHRSVGGIRASLYNAVTIEDVQKLAAFMKKFLEMHQL

SEQ ID NO: 858 - protein, 370 aa, synthetic construct
MDAPRQVVNFGPGPAKLPHSVLLEIQKELLDYKGVGISVLEMSHRSSDFAKIINNTENLVRELLAVPDNYKVIFLQGGGCGQFSAVPLNLIALKAGRCADYVVTGAWSAKAAEEAKKFGTINIVHPKLGSYTKIPDPSTWNLNPDASYVYYCANETVHGVEFDFIPDVKGAVLVCDMSSNFLSKPVDVSKFGVIFAGAQKNVGSAGVTVVIVRDDLLGFALRECPSVLEYKVQAGNSSLYNTPPCFSIYVMGLVLEWIKNNGGAAAMEKLSSIKSQTIYEIIDNSQGFYVCPVEPQNRSKMNIPFRIGNAKGDDALEKRFLDKALELNMLSLKGHRSVGGIRASLYNAVTIEDVQKLAAFMKKFLEMHQL

SEQ ID NO: 859 - protein, 370 aa, synthetic construct
MDAPRQVVNFGPGPAKLPHSVLLEIQKELLDYKGVGISVLEMSHRSSDFAKIINNTENLVRELLAVPDNYKVIFLQGGGCGQFSAVPLNLIGLKAGRCADYVVTGAWSAKAAEEAKKFGTINIVHPKLGSYTKIPDPSTWNLNPDASYVYYCANETVHGVEFDFIPDVKGAVLVCDMSSNFLSKPVDASKFGVIFAGAQKNVGSAGVTVVIVRDDLLGFALRECPSVLEYKVQAGNSSLYNTPPCFSIYVMGLVLEWIKNNGGAAAMEKLSSIKSQTIYEIIDNSQGFYVCPVEPQNRSKMNIPFRIGNAKGDDALEKRFLDKALELNMLSLKGHRSVGGIRASLYNAVTIEDVQKLAAFMKKFLEMHQL

SEQ ID NO: 860 - protein, 370 aa, synthetic construct
MDAPRQVVNFGPGPAKLPHSVLLEIQKELLDYKGVGISVLEMSHRSSDFAKIINNTENLVRELLAVPDNYKVIFLQGGGCGQFSAVPLNLIGLKAGRCADYVVTGAWSAKAAEEAKKFGTINIVHPKLGSYTKIPDPSTWNLNPDASYVYYCANETVHGVEFDFIPDVKGAVLVCDMSSNFLSKPVDVSKFGVIFAGAQKNVGSAGVTVVIVRDDLLGFALRECPSVLEYKVQAGNSSLYNTPPCFSIYVMGLVLEWIKNNGGAAAMEKLSSIKSQTIYEIIDNSQGFYVCPVEPQNRSKMNIPFRIGNAKGDDALEKRFLDKALELNMLSLKGHRSVGGIRASLYNAVTIEDVQKLAAFMKKFLEMHRL

SEQ ID NO: 861 - protein, 370 aa, synthetic construct
MDAPRQVVNFGPGPAKLPHSVLLEIQKELLDYKGVGISVLEMSHRSSDFAKIINNTENLVRELLAVPDNYKVIFLQGGGCGQFSAVPLNLIGLKAGRCADYVVTGAWSAKAAEEAKKFGTINIVLPKLGSYTKIPDPSTWNLNPDASYVYYCANETVHGVEFDFIPDVKGAVLVCDMSSNFLSKPVDVSKFGVIFAGAQKNVGSAGVTVVIVRDDLLGFALRECPSVLEYKVQAGNSSLYNTPPCFSIYVMGLVLEWIKNNGGAAAMEKLSSIKSQTIYEIIDNSQGFYVCPVEPQNRSKMNIPFRIGNAKGDDALEKRFLDKALELNMLSLKGHRSVGGIRASLYNAVTIEDVQKLAAFMKKFLEMHQL

SEQ ID NO: 862 - protein, 370 aa, synthetic construct
MDAPRQVVNFGPGPAKLPHSVLLEIQKELLDYKGVGISVLEMSHRSSDFAKIINNTENLVRELLAVPDNYKVIFLQGGGCGQFSAVPLNLIGLKAGRCADYVVTGAWSAKAAEEAKKFGTINIVHPKLGSYTKIPDPSTWNLNPDASYVYYCANETVHGVEFDFIPDVKGAVLVCDMSSNFLSKPVDVSKFGVIFAGAQKNVGSAGVTVVIVRDDLLGFALRECPSVLEYKVQAGNSSLYNTPPCFSIYVMGLVLQWIKNNGGAAAMEKLSSIKSQTIYEIIDNSQGFYVCPVEPQNRSKMNIPFRIGNAKGDDALEKRFLDKALELNMLSLKGHRSVGGIRASLYNAVTIEDVQKLAAFMKKFLEMHQL

SEQ ID NO: 863 - protein, 370 aa, synthetic construct
MDAPRQVVNFGPGPAKLPHSVLLEIQKELLDYKGVGISVLEMSHRSSDFAKIINNAENLVRELLAVPDNYKVIFLQGGGCGQFSAVPLNLIGLKAGRCADYVVTGAWSAKAAEEAKKFGTINIVHPKLGSYTKIPDPSTWNLNPDASYVYYCANETVHGVEFDFIPDVKGAVLVCDMSSNFLSKPVDVSKFGVIFAGAQKNVGSAGVTVVIVRDDLLGFALRECPSVLEYKVQAGNSSLYNTPPCFSIYVMGLVLEWIKNNGGAAAMEKLSSIKSQTIYEIIDNSQGFYVCPVEPQNRSKMNIPFRIGNAKGDDALEKRFLDKALELNMLSLKGHRSVGGIRASLYNAVTIEDVQKLAAFMKKFLEMHQL

SEQ ID NO: 864 - protein, 370 aa, synthetic construct
MDAPRQVVNFGPGPAKLPHSVLLEIQKELLDYKGVGISVLEMSHRSSDFAKIINNTENLVRELLAVPDNYKVIFLQGGGCGQFSAVPLNLIGLKAGRCADYVVTGAWSAKAAEEAKKFGTINIVHPKLGSYTKIPDPSTWNLNPDASYVYYCANETVHGVEFDFIPDVKGAVLVCDMSSNFLSKPVDVSKFGVIFAGAQKNVGSAGVTVVIVRDDLLGFALRECPSVLEYKVQAGNSSLYNTPPCFSIYVMGLVLEWIKNNGGAAAMKKLSSIKSQTIYEIIDNSQGFYVCPVEPQNRSKMNIPFRIGNAKGDDALEKRFLDKALELNMLSLKGHRSVGGIRASLYNAVTIEDVQKLAAFMKKFLEMHQL

SEQ ID NO: 865 - protein, 370 aa, synthetic construct
MDAPRQVVNFGPGPAKLPHSVLLEIQKELLDYKGVGISVLEMSHRSSDFAKIINNTENLVRELLAVPDNYKVIFLQGGGCGQFSAVPLNLIGLKAGRCADYVVTGAWSAKAAEEAKKFGTINIVHPKLGSYTKIPDQSTWNLNPDASYVYYCANETVHGVEFDFIPDVKGAVLVCDMSSNFLSKPVDVSKFGVIFAGAQKNVGSAGVTVVIVRDDLLGFALRECPSVLEYKVQAGNSSLYNTPPCFSIYVMGLVLEWIKNNGGAAAMEKLSSIKSQTIYEIIDNSQGFYVCPVEPQNRSKMNIPFRIGNAKGDDALEKRFLDKALELNMLSLKGHRSVGGIRASLYNAVTIEDVQKLAAFMKKFLEMHQL

SEQ ID NO: 866 - protein, 370 aa, synthetic construct
MDAPRQVVNFGPGPAKLPHSVLLEIQKELLDYKGVGISVLEMSHRSSDFAKIIDNTENLVRELLAVPDNYKVIFLQGGGCGQFSAVPLNLIGLKAGRCADYVVTGAWSAKAAEEAKKFGTINIVHPKLGSYTKIPDPSTWNLNPDASYVYYCANETVHGVEFDFIPDVKGAVLVCDMSSNFLSKPVDVSKFGVIFAGAQKNVGSAGVTVVIVRDDLLGFALRECPSVLEYKVQAGNSSLYNTPPCFSIYVMGLVLEWIKNNGGAAAMEKLSSIKSQTIYEIIDNSQGFYVCPVEPQNRSKMNIPFRIGNAKGDDALEKRFLDKALELNMLSLKGHRSVGGIRASLYNAVTIEDVQKLAAFMKKFLEMHQL

SEQ ID NO: 867 - protein, 370 aa, synthetic construct
MDAPRQVVNFGPGPAKLPHSVLLEIQKELLDYKGVGISVLEMSHRSSDFAKIINNTENIVRELLAVPDNYKVIFLQGGGCGQFSAVPLNLIGLKAGRCADYVVTGAWSAKAAEEAKKFGTINIVHPKLGSYTKIPDPSTWNLNPDASYVYYCANETVHGVEFDFIPDVKGAVLVCDMSSNFLSKPVDVSKFGVIFAGAQKNVGSAGVTVVIVRDDLLGFALRECPSVLEYKVQAGNSSLYNTPPCFSIYVMGLVLEWIKNNGGAAAMEKLSSIKSQTIYEIIDNSQGFYVCPVEPQNRSKMNIPFRIGNAKGDDALEKRFLDKALELNMLSLKGHRSVGGIRASLYNAVTIEDVQKLAAFMKKFLEMHQL

SEQ ID NO: 868 - protein, 370 aa, synthetic construct
MDAPRQVVNFGPGPAKLPHSVLLEIQKELLDYKGVGISVLEMSHRSSDFAKIINNTANLVRELLAVPDNYKVIFLQGGGCGQFSAVPLNLIGLKAGRCADYVVTGAWSAKAAEEAKKFGTINIVHPKLGSYTKIPDPSTWNLNPDASYVYYCANETVHGVEFDFIPDVKGAVLVCDMSSNFLSKPVDVSKFGVIFAGAQKNVGSAGVTVVIVRDDLLGFALRECPSVLEYKVQAGNSSLYNTPPCFSIYVMGLVLEWIKNNGGAAAMEKLSSIKSQTIYEIIDNSQGFYVCPVEPQNRSKMNIPFRIGNAKGDDALEKRFLDKALELNMLSLKGHRSVGGIRASLYNAVTIEDVQKLAAFMKKFLEMHQL

SEQ ID NO: 869 - protein, 370 aa, synthetic construct
MDAPRQVVNFGPGPAKLPHSVLLEIQKELLDYKGVGISVLEMSHRSSDFAKIINNTENLVRELLAVPDNYKVIFLQGGGCGQFSAVPLNLIGLKAGRCADYVVTGAWSAKAAEEAKKFGTINIVHPKLGSYTKIPDPSTWNLNPDAAYVYYCANETVHGVEFDFIPDVKGAVLVCDMSSNFLSKPVDVSKFGVIFAGAQKNVGSAGVTVVIVRDDLLGFALRECPSVLEYKVQAGNSSLYNTPPCFSIYVMGLVLEWIKNNGGAAAMEKLSSIKSQTIYEIIDNSQGFYVCPVEPQNRSKMNIPFRIGNAKGDDALEKRFLDKALELNMLSLKGHRSVGGIRASLYNAVTIEDVQKLAAFMKKFLEMHQL

SEQ ID NO: 870 - protein, 370 aa, synthetic construct
MDAPRQVVNFGPGPAKLPHSVLLEIQKELLDYKGVGISVLEMSHRSSDFAKIINNTENLVRELLAVPDNYKVIFLQGGGCGQFSAVPLNLIGLEAGRCADYVVTGAWSAKAAEEAKKFGTINIVHPKLGSYTKIPDPSTWNLNPDASYVYYCANETVHGVEFDFIPDVKGAVLVCDMSSNFLSKPVDVSKFGVIFAGAQKNVGSAGVTVVIVRDDLLGFALRECPSVLEYKVQAGNSSLYNTPPCFSIYVMGLVLEWIKNNGGAAAMEKLSSIKSQTIYEIIDNSQGFYVCPVEPQNRSKMNIPFRIGNAKGDDALEKRFLDKALELNMLSLKGHRSVGGIRASLYNAVTIEDVQKLAAFMKKFLEMHQL

SEQ ID NO: 871 - protein, 370 aa, synthetic construct
MDAPRQVVNFGPGPAKLPHSVLLEIQKELLDYKGVGISVLEMSHRSSDFAMIINNTENLVRELLAVPDNYKVIFLQGGGCGQFSAVPLNLIGLKAGRCADYVVTGAWSAKAAEEAKKFGTINIVHPKLGSYTKIPDPSTWNLNPDASYVYYCANETVHGVEFDFIPDVKGAVLVCDMSSNFLSKPVDVSKFGVIFAGAQKNVGSAGVTVVIVRDDLLGFALRECPSVLEYKVQAGNSSLYNTPPCFSIYVMGLVLEWIKNNGGAAAMEKLSSIKSQTIYEIIDNSQGFYVCPVEPQNRSKMNIPFRIGNAKGDDALEKRFLDKALELNMLSLKGHRSVGGIRASLYNAVTIEDVQKLAAFMKKFLEMHQL

SEQ ID NO: 872 - protein, 370 aa, synthetic construct
MDAPRQVVNFGPGPAKLPHSVLLEIQKELLDYKGVGISVLEMSHRSSDFAKIINNTENLVRELLAVPDNYKVIFLQGGGCGQFSAVPLNLIGLKAGRCADYVVTGAWSAKAAEEAKKFGTINIVHPKLGSYTKIPDPSTWNLNPDASYVYYCANETVHGVEFDFIPDVKGAVLVCDMSSNFLSKPVDVSKFGVIFAGAQKNVGSAGVTVVIVRDDLLGFALRECPSVLEYKVQAGNNSLYNTPPCFSIYVMGLVLEWIKNNGGAAAMEKLSSIKSQTIYEIIDNSQGFYVCPVEPQNRSKMNIPFRIGNAKGDDALEKRFLDKALELNMLSLKGHRSVGGIRASLYNAVTIEDVQKLAAFMKKFLEMHQL

SEQ ID NO: 873 - protein, 370 aa, synthetic construct
MDAPRQVVNFGPGPAKLPHSVLLEIQKELLDYKGVGISVLEMSHRSSDFAKIINNTENLLRELLAVPDNYKVIFLQGGGCGQFSAVPLNLIGLKAGRCADYVVTGAWSAKAAEEAKKFGTINIVHPKLGSYTKIPDPSTWNLNPDASYVYYCANETVHGVEFDFIPDVKGAVLVCDMSSNFLSKPVDVSKFGVIFAGAQKNVGSAGVTVVIVRDDLLGFALRECPSVLEYKVQAGNSSLYNTPPCFSIYVMGLVLEWIKNNGGAAAMEKLSSIKSQTIYEIIDNSQGFYVCPVEPQNRSKMNIPFRIGNAKGDDALEKRFLDKALELNMLSLKGHRSVGGIRASLYNAVTIEDVQKLAAFMKKFLEMHQL

SEQ ID NO: 874 - protein, 370 aa, synthetic construct
MDAPRQVVNFGPGPAKLPHSVLLEIQKELLDYKGVGISVLEMSHRSSDFAKIINNTENLVRELLAVPDNYKVIFLQGGGCGQFSAVPLNLIGLKAGRCADYVVTGAWSAKAAEEAKKFGTINIVHPKLGSYTKIPDPSTWNLNPDASYVYYCANETVHGVEFDFIPDVKGAVLVCDMSSNFLSKPVDVSKFGVIFAGAQKNVGSAGVTVVIVRDDLLGFALRECPSVLEYKVQAGNSSLYNTPPCFSIYVMGMVLEWIKNNGGAAAMEKLSSIKSQTIYEIIDNSQGFYVCPVEPQNRSKMNIPFRIGNAKGDDALEKRFLDKALELNMLSLKGHRSVGGIRASLYNAVTIEDVQKLAAFMKKFLEMHQL

SEQ ID NO: 875 - protein, 370 aa, synthetic construct
MDAPRQVVNFGPGPAKLPHSVLLEIQKELLDYKGVGISVLEMSHRSSDFAKIINNTENLVRELLAVPDNYKVIFLQGGGCGQFSAVPLNLIGLKAGRCADYVVTGAWSAKAAEEAKKFGTINIVHPKLGSYTKIPDPSTWNLNPDASYVYYCANETVHGVEFDFIPDVKGAVLVCDMSSNFLSKPVDVSKFGVIFAGAQKNVGSAGVTVVIVRDDLLGFALRECPSVLEYKVQAGHSSLYNTPPCFSIYVMGLVLEWIKNNGGAAAMEKLSSIKSQTIYEIIDNSQGFYVCPVEPQNRSKMNIPFRIGNAKGDDALEKRFLDKALELNMLSLKGHRSVGGIRASLYNAVTIEDVQKLAAFMKKFLEMHQL

SEQ ID NO: 876 - protein, 370 aa, synthetic construct
MDAPRQVVNFGPGPAKLPHSVLLEIQKELLDYKGVGISVLEMSHRSSDFAKIINNTENLVRELLAVPDNYKVIFLQGGGCGQFSAVPLNLIGLKAGRCADYVVTGAWSAKAAEEAKKFGTINIVHPKLGSYTKIPDPSTWNLNPDASYVYYCANETVHGVEFDFIPDVKGAVLVCDMSSNFLSKPVDVSKFGVIFAGAQKNVGSAGVTVVIVRDDLLGFALRECPSVLEYKVQAANSSLYNTPPCFSIYVMGLVLEWIKNNGGAAAMEKLSSIKSQTIYEIIDNSQGFYVCPVEPQNRSKMNIPFRIGNAKGDDALEKRFLDKALELNMLSLKGHRSVGGIRASLYNAVTIEDVQKLAAFMKKFLEMHQL

SEQ ID NO: 877 - protein, 370 aa, synthetic construct
MDAPRQVVNFGPGPAKLPHSVLLEIQKELLDYKGVGISVLEMSHRSSDFAKIINNTENLVRELLAVPDNYKVIFLQGGGCGQFSAVPLNLIGLKAGRCADYVVTGAWSAKAAEEAKKFGTINIVHPKLGSYTKIPDPSTWNLNPDASYVYYCANETVHGVEFDFIPDVKGAVLVCDMSSNFLSKPVDVSKFGVIFAGAQKNVGSAGVTVVFVRDDLLGFALRECPSVLEYKVQAGNSSLYNTPPCFSIYVMGLVLEWIKNNGGAAAMEKLSSIKSQTIYEIIDNSQGFYVCPVEPQNRSKMNIPFRIGNAKGDDALEKRFLDKALELNMLSLKGHRSVGGIRASLYNAVTIEDVQKLAAFMKKFLEMHQL

SEQ ID NO: 878 - protein, 370 aa, synthetic construct
MDAPRQVVNFGPGPAQLPHSVLLEIQKELLDYKGVGISVLEMSHRSSDFAKIINNTENLVRELLAVPDNYKVIFLQGGGCGQFSAVPLNLIGLKAGRCADYVVTGAWSAKAAEEAKKFGTINIVHPKLGSYTKIPDPSTWNLNPDASYVYYCANETVHGVEFDFIPDVKGAVLVCDMSSNFLSKPVDVSKFGVIFAGAQKNVGSAGVTVVIVRDDLLGFALRECPSVLEYKVQAGNSSLYNTPPCFSIYVMGLVLEWIKNNGGAAAMEKLSSIKSQTIYEIIDNSQGFYVCPVEPQNRSKMNIPFRIGNAKGDDALEKRFLDKALELNMLSLKGHRSVGGIRASLYNAVTIEDVQKLAAFMKKFLEMHQL

SEQ ID NO: 879 - protein, 370 aa, synthetic construct
MDAPRQVVNFGPGPAKLPHSVLLEIQKELLDYKGVGISVLEMSHRSSDFAKIINNTENLVRELLVVPDNYKVIFLQGGGCGQFSAVPLNLIGLKAGRCADYVVTGAWSAKAAEEAKKFGTINIVHPKLGSYTKIPDPSTWNLNPDASYVYYCANETVHGVEFDFIPDVKGAVLVCDMSSNFLSKPVDVSKFGVIFAGAQKNVGSAGVTVVIVRDDLLGFALRECPSVLEYKVQAGNSSLYNTPPCFSIYVMGLVLEWIKNNGGAAAMEKLSSIKSQTIYEIIDNSQGFYVCPVEPQNRSKMNIPFRIGNAKGDDALEKRFLDKALELNMLSLKGHRSVGGIRASLYNAVTIEDVQKLAAFMKKFLEMHQL

SEQ ID NO: 880 - protein, 370 aa, synthetic construct
MDAPRQVVNFGPGPAKLPHSVLLEIQKELLDYKGVGISVLEMSHRSSDFAKIINNTENLVRELLAVPDNYKVIFLQGGGCGQFSAVPLNLIGLKAGRCADYVVTGAWSAKAAEEAKKFGTINIVHPKLGSYTKIPDPSTWNLNPDASYVYYCANETVHGVEFDFIPDVKGAVLVCDMSSNFLSKPVDVSKFGVIFAGAQKNVGSAGVTVVIVRDDLLGFALRECPSVLEYKVQAGNSSLYNTPPCFSIYVMGLVLEWIKNNGGAAAMEKLSSIKSQTIYEIIANSQGFYVCPVEPQNRSKMNIPFRIGNAKGDDALEKRFLDKALELNMLSLKGHRSVGGIRASLYNAVTIEDVQKLAAFMKKFLEMHQL

SEQ ID NO: 881 - protein, 370 aa, synthetic construct
MDAPRQVVNFGPGPAKLPHSVLLEIQKELLDYKGVGISVLEMSHRSSDFAKIINNTENLVRELLAVPDNYKVIFLQGGGCGQFSAVPLNLIGLKAGRCADYVVTGAWSAKAAEEAKKFGTINIVHPKLGSYTKIPDPSTWNLNPDASYVYYCANETVHGVEFGFIPDVKGAVLVCDMSSNFLSKPVDVSKFGVIFAGAQKNVGSAGVTVVIVRDDLLGFALRECPSVLEYKVQAGNSSLYNTPPCFSIYVMGLVLEWIKNNGGAAAMEKLSSIKSQTIYEIIDNSQGFYVCPVEPQNRSKMNIPFRIGNAKGDDALEKRFLDKALELNMLSLKGHRSVGGIRASLYNAVTIEDVQKLAAFMKKFLEMHQL

SEQ ID NO: 882 - protein, 370 aa, synthetic construct
MDAPRQVVNFGPGPAKLPHSVLLEIQKELLDYKGVGISVLEMSHRSSDFAKIINNTENLVRELLAVPDNYKVIFLQGGGCGQFSAVPLNLIGLKAGRCADYVVTGAWSAKAAEEAKKFGTINIVHPKLGSYTKIPDPSTWNLNPDASYVYYCANETVHGVEFDFIPDVKGAVLVCDMSSNFLSKPVDVSKFGVIFAGAQKNVGSAGVTVVIVRDDLLGFALRECPSVLEYKVQAGNSSLYNTPPCFSIYVMGLVLEWIKNNGGAAAMEKLSSIKSQTIYEIIDNSQAFYVCPVEPQNRSKMNIPFRIGNAKGDDALEKRFLDKALELNMLSLKGHRSVGGIRASLYNAVTIEDVQKLAAFMKKFLEMHQL

SEQ ID NO: 883 - protein, 370 aa, synthetic construct
MDAPRQVVNFGPGPAKLPHSVLLEIQKELLDYKGVGISVLEMSHRSSDFAKIINNTENLVRELLAVPDNYKVIFLQGGGCGQFSAVPLNLIGLKAGRCADYVVTGAWSAKAAEEAKKFGTINIVHPKLGSYTKIPDPSTWNLNPDASYVYYCANETVHGVEFDFIPDVKGAVLVCDMSSNFLSKPVDVSKFGVIFAGAQKNVGSAGVTVVIVRDDLLGFALRECASVLEYKVQAGNSSLYNTPPCFSIYVMGLVLEWIKNNGGAAAMEKLSSIKSQTIYEIIDNSQGFYVCPVEPQNRSKMNIPFRIGNAKGDDALEKRFLDKALELNMLSLKGHRSVGGIRASLYNAVTIEDVQKLAAFMKKFLEMHQL

SEQ ID NO: 884 - protein, 370 aa, synthetic construct
MDAPRQVVNFGPGPAKLPHSVLLEIQKELLDYKGVGISVLEMSHRSSDFAKIINNTENLVRELLAVPDNYKVIFLQGGGCGQFSAVPLNLIGLKAGRCADYVVTGAWSAKAAEEAKKFGTINIVHPNLGSYTKIPDPSTWNLNPDASYVYYCANETVHGVEFDFIPDVKGAVLVCDMSSNFLSKPVDVSKFGVIFAGAQKNVGSAGVTVVIVRDDLLGFALRECPSVLEYKVQAGNSSLYNTPPCFSIYVMGLVLEWIKNNGGAAAMEKLSSIKSQTIYEIIDNSQGFYVCPVEPQNRSKMNIPFRIGNAKGDDALEKRFLDKALELNMLSLKGHRSVGGIRASLYNAVTIEDVQKLAAFMKKFLEMHQL

SEQ ID NO: 885 - protein, 370 aa, synthetic construct
MDAPRQVVNFGPGPAKLPHSVLLEIQKELLDYEGVGISVLEMSHRSSDFAKIINNTENLVRELLAVPDNYKVIFLQGGGCGQFSAVPLNLIGLKAGRCADYVVTGAWSAKAAEEAKKFGTINIVHPKLGSYTKIPDPSTWNLNPDASYVYYCANETVHGVEFDFIPDVKGAVLVCDMSSNFLSKPVDVSKFGVIFAGAQKNVGSAGVTVVIVRDDLLGFALRECPSVLEYKVQAGNSSLYNTPPCFSIYVMGLVLEWIKNNGGAAAMEKLSSIKSQTIYEIIDNSQGFYVCPVEPQNRSKMNIPFRIGNAKGDDALEKRFLDKALELNMLSLKGHRSVGGIRASLYNAVTIEDVQKLAAFMKKFLEMHQL

SEQ ID NO: 886 - protein, 370 aa, synthetic construct
MDAPRQVVNFGPGPAKLPHSVLLEIQKELLDYKGVGISVLEMSHRSSDFAKIINNTENLVRELLAVPDNYKVIFLQGGGCGQFSAVPLNLIGLKAGRCADYVVTGAWSAKAAEEAKKFGTINIVHPKLGSYTKIPDPSTWNLNPDASYVYYCANETVHGVEFDFIPDVKGAVLVCDMSSNFLSKPVDVSKFGVIFAGAQKNVGSAGVTVVIVRDDLLGFALRECPSVLEYKVQAGNSSLYNTPPCFSIYVMGLVLEWIKNNGGAAAMEKLSSIKSQTIYEIIDNSQGFYVCPVEPQNRSKMNIPFRIGNAKGDDALEKRFLDKALELNMLSLKGHRSVGGIRASLYNAVTIEDVQKLAAFMKKYLEMHQL

SEQ ID NO: 887 - protein, 370 aa, synthetic construct
MDAPRQVVNFGPGPAKLPHSVLLEIQKELLDYKGVGISVLEMSHRSSDFAKIINNTENHVRELLAVPDNYKVIFLQGGGCGQFSAVPLNLIGLKAGRCADYVVTGAWSAKAAEEAKKFGTINIVHPKLGSYTKIPDPSTWNLNPDASYVYYCANETVHGVEFDFIPDVKGAVLVCDMSSNFLSKPVDVSKFGVIFAGAQKNVGSAGVTVVIVRDDLLGFALRECPSVLEYKVQAGNSSLYNTPPCFSIYVMGLVLEWIKNNGGAAAMEKLSSIKSQTIYEIIDNSQGFYVCPVEPQNRSKMNIPFRIGNAKGDDALEKRFLDKALELNMLSLKGHRSVGGIRASLYNAVTIEDVQKLAAFMKKFLEMHQL

SEQ ID NO: 888 - protein, 370 aa, synthetic construct
MDAPRQVVNFGPGPAKLPHSVLLEIQKELLDYKGVGISFLEMSHRSSDFAKIINNTENLVRELLAVPDNYKVIFLQGGGCGQFSAVPLNLIGLKAGRCADYVVTGAWSAKAAEEAKKFGTINIVHPKLGSYTKIPDPSTWNLNPDASYVYYCANETVHGVEFDFIPDVKGAVLVCDMSSNFLSKPVDVSKFGVIFAGAQKNVGSAGVTVVIVRDDLLGFALRECPSVLEYKVQAGNSSLYNTPPCFSIYVMGLVLEWIKNNGGAAAMEKLSSIKSQTIYEIIDNSQGFYVCPVEPQNRSKMNIPFRIGNAKGDDALEKRFLDKALELNMLSLKGHRSVGGIRASLYNAVTIEDVQKLAAFMKKFLEMHQL

SEQ ID NO: 889 - protein, 370 aa, synthetic construct
MDAPRQVVNFGPGPAKLPHSVLLEIQKELLDYKGVGISVLEMSHRSSDFAKIINNTENLVRELLAVPDNYKVIFLQGGGCGQFSAVPLNLIGLKAGRCADYVVTGAWSGKAAEEAKKFGTINIVHPKLGSYTKIPDPSTWNLNPDASYVYYCANETVHGVEFDFIPDVKGAVLVCDMSSNFLSKPVDVSKFGVIFAGAQKNVGSAGVTVVIVRDDLLGFALRECPSVLEYKVQAGNSSLYNTPPCFSIYVMGLVLEWIKNNGGAAAMEKLSSIKSQTIYEIIDNSQGFYVCPVEPQNRSKMNIPFRIGNAKGDDALEKRFLDKALELNMLSLKGHRSVGGIRASLYNAVTIEDVQKLAAFMKKFLEMHQL

SEQ ID NO: 890 - protein, 370 aa, synthetic construct
MDAPRQVVNFGPGPAKLPHSVLLEIQKELLDYKGVGISVLEMSHRSSDFAKIINNTENLVRELLAVPDNYKVIFLQGGGCGQFSAVPLNLIGLKAGRCADYVVTGAWSAKAAEEAKKFGTINIVHPKLGSYTKIPDPSTWNLNPDASYVYYCANETVHGVEFDFIPDVKGVVLVCDMSSNFLSKPVDVSKFGVIFAGAQKNVGSAGVTVVIVRDDLLGFALRECPSVLEYKVQAGNSSLYNTPPCFSIYVMGLVLEWIKNNGGAAAMEKLSSIKSQTIYEIIDNSQGFYVCPVEPQNRSKMNIPFRIGNAKGDDALEKRFLDKALELNMLSLKGHRSVGGIRASLYNAVTIEDVQKLAAFMKKFLEMHQL

SEQ ID NO: 891 - protein, 370 aa, synthetic construct
MDAPRQVVNFGPGPAKLPHSVLLEIQKELLDYKGVGISVLEMSHRSSDFAKIINNTENLVRELLAVPDNYKVIFLQGGGCGQFSAVPLNLIGLKAGRCADYVVTGAWSAKAAEEAKKFGTINIVHPKLGSYTKIPDPSTWNLNPDASYVYYCANETVHGVEFDFIPDVKGAVLVCDMSSNFLSKPVDVSKFGVIFAGAQKNVGSAGVTVVIVRDDLLGFALRECPSDLEYKVQAGNSSLYNTPPCFSIYVMGLVLEWIKNNGGAAAMEKLSSIKSQTIYEIIDNSQGFYVCPVEPQNRSKMNIPFRIGNAKGDDALEKRFLDKALELNMLSLKGHRSVGGIRASLYNAVTIEDVQKLAAFMKKFLEMHQL

SEQ ID NO: 892 - protein, 370 aa, synthetic construct
MDAPRQVVNFGPGPAKLPHSVLLEIQKELLDYKGVGISVLEMSHRSSDFAKIINNTENLVRELLAVPDNYKVIFLQGGGCGQFSAVPLNLIGLKAGRCADYVVTGAWSAKAAEEAKKFGTINIVHPKLGSYTKIPDPSTWNLNPDASYVYYCANETVHGVEFDFIPDVKGAVLVCDMSSNFLSKPVDVSKFGVIFAGAQKNVGSAGVTVVIVRDDLLGFALRECPSVLEYKVQAGNSSLYNTPPCFSIYVMGLVLEWIKNNGGAAAMEKLSSIKSQIIYEIIDNSQGFYVCPVEPQNRSKMNIPFRIGNAKGDDALEKRFLDKALELNMLSLKGHRSVGGIRASLYNAVTIEDVQKLAAFMKKFLEMHQL

SEQ ID NO: 893 - protein, 370 aa, synthetic construct
MDAPRQVVNFGPGPAKLPHSVLLEIQKELLDYKGVGISVLEMSHRSSDFAKIINNTENLVRELLAVPDNYKVIFLQGGGCGQFSAVPLNLIGLKAGRCADYVVTGAWSAKAAEEAKKFGTINIVHPKLGSYTKIPDPSTWNLNPDASYVYYCANETVHGVEFDFIPDVKGAVLVCDMSSNFLSKPVDVSKFGVIFAGAQKNVGSAGVTVVIVRDDLQGFALRECPSVLEYKVQAGNSSLYNTPPCFSIYVMGLVLEWIKNNGGAAAMEKLSSIKSQTIYEIIDNSQGFYVCPVEPQNRSKMNIPFRIGNAKGDDALEKRFLDKALELNMLSLKGHRSVGGIRASLYNAVTIEDVQKLAAFMKKFLEMHQL

SEQ ID NO: 894 - protein, 370 aa, synthetic construct
MDAPRQVVNFGPGPAKLPHSVLLEIQKELLDYKGVGISVLEMSHRSSDFAKIINNTENLVRELLAVPDNYKVIFLQGGGCGQFSAVPLNLIGLKAGRCADYVVTGAWSAKAAEEAKKFGTINIVHPKLGSYTKIPDPSTWNLNPDASYVYYCANETVHGVEFDFIPDVKGAVLVCDTSSNFLSKPVDVSKFGVIFAGAQKNVGSAGVTVVIVRDDLLGFALRECPSVLEYKVQAGNSSLYNTPPCFSIYVMGLVLEWIKNNGGAAAMEKLSSIKSQTIYEIIDNSQGFYVCPVEPQNRSKMNIPFRIGNAKGDDALEKRFLDKALELNMLSLKGHRSVGGIRASLYNAVTIEDVQKLAAFMKKFLEMHQL

SEQ ID NO: 895 - protein, 370 aa, synthetic construct
MDAPRQVVNFGPGPAKLPPSVLLEIQKELLDYKGVGISVLEMSHRSSDFAKIINNTENLVRELLAVPDNYKVIFLQGGGCGQFSAVPLNLIGLKAGRCADYVVTGAWSAKAAEEAKKFGTINIVHPKLGSYTKIPDPSTWNLNPDASYVYYCANETVHGVEFDFIPDVKGAVLVCDMSSNFLSKPVDVSKFGVIFAGAQKNVGSAGVTVVIVRDDLLGFALRECPSVLEYKVQAGNSSLYNTPPCFSIYVMGLVLEWIKNNGGAAAMEKLSSIKSQTIYEIIDNSQGFYVCPVEPQNRSKMNIPFRIGNAKGDDALEKRFLDKALELNMLSLKGHRSVGGIRASLYNAVTIEDVQKLAAFMKKFLEMHQL

SEQ ID NO: 896 - protein, 370 aa, synthetic construct
MDAPRQVVNFGPGPAKLPHSVLLEIQKELLDYKGVGISVLEMSHRSSDFAKIINNTENLVRELLAVPDNYKVIFLQGGGCGQFSAVPLNLIGLKAGRCADYVVTGAWSAKAAEEAKKFGTINIVHPKLGSYTKIPDPSTWNLNPDASYVYYCANETVHGVEFDSIPDVKGAVLVCDMSSNFLSKPVDVSKFGVIFAGAQKNVGSAGVTVVIVRDDLLGFALRECPSVLEYKVQAGNSSLYNTPPCFSIYVMGLVLEWIKNNGGAAAMEKLSSIKSQTIYEIIDNSQGFYVCPVEPQNRSKMNIPFRIGNAKGDDALEKRFLDKALELNMLSLKGHRSVGGIRASLYNAVTIEDVQKLAAFMKKFLEMHQL

SEQ ID NO: 897 - protein, 370 aa, synthetic construct
MDAPRQVVNFGPGPAKLPHSVLLEIQKELLDYKGVGISVLEMSHRSSDFAKIINNTENLVRELLAVPDNYKVIFLQGGGCGQFSAVPLNLIGLKAGRCADYVVTGAWSAKAAEEAKKFGTINIVHPKLGSYTKIPDPSTWNLNPDASYVYYCANETVHGVEFDFIPDVKGAVLVCDMSSNFLSKPVDVSKFGVIFAGAQKNVGSAGVTVVIVRDDLLGFALRECPSVLEYKVQAGNSSLYNTPPCFSIYVMGLVLEWIKNNGCAAAMEKLSSIKSQTIYEIIDNSQGFYVCPVEPQNRSKMNIPFRIGNAKGDDALEKRFLDKALELNMLSLKGHRSVGGIRASLYNAVTIEDVQKLAAFMKKFLEMHQL

SEQ ID NO: 898 - protein, 370 aa, synthetic construct
MDAPRQVVNFGPGPAKLPHSVLLEIQKELLDYKGVGISVLEMSHRSSDFAKIINNTENLVRELLAVPDNYKVIFLQGGGCGQFSAVPLNLIGLKAGRCADYVVTGAWSAKAAEEAKKFGTINIVHPKLGSYTKIPDPSTWNLNPDASYVYYCANETVHGVEFDFIPDVKGAVLVCDMSSNFLSKPVDVSKFGVIFAGAQKNVGSAGVTVVIVRDDLLGFALRVCPSVLEYKVQAGNSSLYNTPPCFSIYVMGLVLEWIKNNGGAAAMEKLSSIKSQTIYEIIDNSQGFYVCPVEPQNRSKMNIPFRIGNAKGDDALEKRFLDKALELNMLSLKGHRSVGGIRASLYNAVTIEDVQKLAAFMKKFLEMHQL

SEQ ID NO: 899 - protein, 370 aa, synthetic construct
MDAPRQVVNFGPGPAKLPHSVLLEIQKELLDYKGVGISVLEMSHRSSDFAKIINNTENLVRELLAVPDNYKVIFLQGGGCGQFSAVPLNLIGLKAGRCADYVVTGAWSAKAAEEAKKFGTINIVHPKLGSYTKIPDPSTWNLNPDASYVYYCANETVHGVEFDFIPDVKGAVLVCDMSSNFLSKPVDVSKFGVIFAGAQKNVGSAGVTVVIVRDDVLGFALRECPSVLEYKVQAGNSSLYNTPPCFSIYVMGLVLEWIKNNGGAAAMEKLSSIKSQTIYEIIDNSQGFYVCPVEPQNRSKMNIPFRIGNAKGDDALEKRFLDKALELNMLSLKGHRSVGGIRASLYNAVTIEDVQKLAAFMKKFLEMHQL

SEQ ID NO: 900 - protein, 370 aa, synthetic construct
MDAPRQVVNFGPGPAKLPHSVLLEIQKELLDYKGVGISVLEMSHRSSNFAKIINNTENLVRELLAVPDNYKVIFLQGGGCGQFSAVPLNLIGLKAGRCADYVVTGAWSAKAAEEAKKFGTINIVHPKLGSYTKIPDPSTWNLNPDASYVYYCANETVHGVEFDFIPDVKGAVLVCDMSSNFLSKPVDVSKFGVIFAGAQKNVGSAGVTVVIVRDDLLGFALRECPSVLEYKVQAGNSSLYNTPPCFSIYVMGLVLEWIKNNGGAAAMEKLSSIKSQTIYEIIDNSQGFYVCPVEPQNRSKMNIPFRIGNAKGDDALEKRFLDKALELNMLSLKGHRSVGGIRASLYNAVTIEDVQKLAAFMKKFLEMHQL

SEQ ID NO: 901 - protein, 370 aa, synthetic construct
MDAPRQVVNFGPGPAKLPHSVLLEIQKELLDYKGVGISVLEMSHRSSDFAKIINNTENLVRELLAVPDNYKVIFLQGGGCGQFSAVPLNLIGLKAGRCADYVVTGAWSAKAAEEAKKFGTINIVHPKLGSYTKIPDPSTWNLNPDASYVYYCANETVHGVEFDFIPDVKGAVLVCDMSSNFLSKPVDVSKFGVIFAGAQKNVGSAGVTVVIVRDDLVGFALRECPSVLEYKVQAGNSSLYNTPPCFSIYVMGLVLEWIKNNGGAAAMEKLSSIKSQTIYEIIDNSQGFYVCPVEPQNRSKMNIPFRIGNAKGDDALEKRFLDKALELNMLSLKGHRSVGGIRASLYNAVTIEDVQKLAAFMKKFLEMHQL

SEQ ID NO: 902 - protein, 370 aa, synthetic construct
MDAPRQVVNFGPGPAKLPHSVLLEIQKELLDYKGVGISVLEMSHRSSDFAKIINNTENLVRELLAVPDNYKVIFLQGGGCGQFSAVPLNLIGLKAGRCADYVVTGAWSAKAAEEAKKFGTINIVHPKLGSYTKIPDPSTWNLNPDASYVYYCANETVHGVEFDFIPDVKGAVLVCDMSSNFLSKPVDVSKFGVIFAGAQKNVGSAGVTVVIVRDDLLGFALRECPSVLQYKVQAGNSSLYNTPPCFSIYVMGLVLEWIKNNGGAAAMEKLSSIKSQTIYEIIDNSQGFYVCPVEPQNRSKMNIPFRIGNAKGDDALEKRFLDKALELNMLSLKGHRSVGGIRASLYNAVTIEDVQKLAAFMKKFLEMHQL

SEQ ID NO: 903 - protein, 370 aa, synthetic construct
MDAPRQVVNFGPGPAKLPHSVLLEIQKELLDYKGVGISVLEMSHRSSDFAKIINNTENLVRELLAVPDNYKVIFLQGGGCGQFSAVPLNLIGLKAGRCADYVVTGAWSAKAAEEAKKFGTINIVHPKLGSYTKIPDPSTWNLNPDASYVYYCANETVHGVEFDFIPDVKGAVLVCDMSSNFLSKPVDVSKFGVIFAGAQKNVGSAGVTVVIVRDDLLGFALRECPSVLEYKVQAGNSSLYNTPPCFSIYVMGLVLEWIKNNGGAAAMEKLSSIKSQTIYEIIDNSQGFYVCPVELQNRSKMNIPFRIGNAKGDDALEKRFLDKALELNMLSLKGHRSVGGIRASLYNAVTIEDVQKLAAFMKKFLEMHQL

SEQ ID NO: 904 - protein, 370 aa, synthetic construct
MDAPRQVVNFGPGPAKLPHSVLLEIQKELLDYKGVGISVLEMSHRSSDFAKIINNTENLVRELLAVPDNYKVIFLQGGGCGQFSAVPLNLIGLKAGRCADYVVTGAWSAKAAVEAKKFGTINIVHPKLGSYTKIPDPSTWNLNPDASYVYYCANETVHGVEFDFIPDVKGAVLVCDMSSNFLSKPVDVSKFGVIFAGAQKNVGSAGVTVVIVRDDLLGFALRECPSVLEYKVQAGNSSLYNTPPCFSIYVMGLVLEWIKNNGGAAAMEKLSSIKSQTIYEIIDNSQGFYVCPVEPQNRSKMNIPFRIGNAKGDDALEKRFLDKALELNMLSLKGHRSVGGIRASLYNAVTIEDVQKLAAFMKKFLEMHQL

SEQ ID NO: 905 - protein, 370 aa, synthetic construct
MDAPRQVVNLGPGPAKLPHSVLLEIQKELLDYKGVGISVLEMSHRSSDFAKIINNTENLVRELLAVPDNYKVIFLQGGGCGQFSAVPLNLIGLKAGRCADYVVTGAWSAKAAEEAKKFGTINIVHPKLGSYTKIPDPSTWNLNPDASYVYYCANETVHGVEFDFIPDVKGAVLVCDMSSNFLSKPVDVSKFGVIFAGAQKNVGSAGVTVVIVRDDLLGFALRECPSVLEYKVQAGNSSLYNTPPCFSIYVMGLVLEWIKNNGGAAAMEKLSSIKSQTIYEIIDNSQGFYVCPVEPQNRSKMNIPFRIGNAKGDDALEKRFLDKALELNMLSLKGHRSVGGIRASLYNAVTIEDVQKLAAFMKKFLEMHQL

SEQ ID NO: 906 - protein, 370 aa, synthetic construct
MDAPRQVVNFGPGPAKLPHSVLLEIQKELLDYKGVGISVLEMSHRSSDFAKIINNTENLVRELLAVPDNYKVIFLQGGGCGQFSAVPLNLIGLKAGRCADYVVTGAWSAKAAEEAKKFGTINIVHPKLGSYTKIPDPSTWNLNPDASYVYYCANETVHGVEFDIIPDVKGAVLVCDMSSNFLSKPVDVSKFGVIFAGAQKNVGSAGVTVVIVRDDLLGFALRECPSVLEYKVQAGNSSLYNTPPCFSIYVMGLVLEWIKNNGGAAAMEKLSSIKSQTIYEIIDNSQGFYVCPVEPQNRSKMNIPFRIGNAKGDDALEKRFLDKALELNMLSLKGHRSVGGIRASLYNAVTIEDVQKLAAFMKKFLEMHQL

SEQ ID NO: 907 - protein, 370 aa, synthetic construct
MDAPRQVVNFGPGPAKLPHSVLLEIQKELLDYKGVGISVLEMSHRSSDFAKIINNTENLVRELLAVPDNYKVIFLQGGGCGQFSAVPLNLIGLKAGRCADYVVTGAWSAKAAEEAKKFGTINIVHPKLGSYTKIPDPSTWNLNPDASYVYYCANETVHGVEFDFIPDVKGAVLVCDMSSNFLSKPVDVSKFGVIFAGAQKNVGSAGVTVVIVRDDLLGFALRECPSVLEYKVQAGNSSLYNTPPCFSIYVMGLVLEWIKNNGGAAAMEKLSSIKSQTIYEIIDNSQGFYVCPVEPQNRSKMNVPFRIGNAKGDDALEKRFLDKALELNMLSLKGHRSVGGIRASLYNAVTIEDVQKLAAFMKKFLEMHQL

SEQ ID NO: 908 - protein, 370 aa, synthetic construct
MDAPRQVVNFGPGPAKLPHSVLLEIQKELLDYKGVGIGVLEMSHRSSDFAKIINNTENLVRELLAVPDNYKVIFLQGGGCGQFSAVPLNLIGLKAGRCADYVVTGAWSAKAAEEAKKFGTINIVHPKLGSYTKIPDPSTWNLNPDASYVYYCANETVHGVEFDFIPDVKGAVLVCDMSSNFLSKPVDVSKFGVIFAGAQKNVGSAGVTVVIVRDDLLGFALRECPSVLEYKVQAGNSSLYNTPPCFSIYVMGLVLEWIKNNGGAAAMEKLSSIKSQTIYEIIDNSQGFYVCPVEPQNRSKMNIPFRIGNAKGDDALEKRFLDKALELNMLSLKGHRSVGGIRASLYNAVTIEDVQKLAAFMKKFLEMHQL

SEQ ID NO: 909 - protein, 370 aa, synthetic construct
MDAPRQVVNFGPGPAKLPHSVLLEIQKELLDYKGVGISVLEMSHRSSDFAKIINNTENLVRELLAVPDNYKVIFLQGGGCGQFSAVPLNLIGLKAGRCADYVVTGAWSAKAAEEAKKFGTINIVHPKLGSYTKIPDPSTWNLNPDASYVYYCANETVHGVEFDFIPDVKGAVLVCDMSSNFLSKPVDVSKFGVIFAGAQKNVGSAGVTVVIVRDDLLGFALRECPSVLEYKVQAGNSSLYNTPPCFSIYVMGLVLEWIKNNGGAAAMEKLSSIKSQTIYEIIDNSQGFYVCPVEPQNRSKMNIPFRIGNAKGDDALEKRFLDEALELNMLSLKGHRSVGGIRASLYNAVTIEDVQKLAAFMKKFLEMHQL

SEQ ID NO: 910 - protein, 370 aa, synthetic construct
MDAPRQVVNFGPGPAKLPHSVLLEIQKELLDYKGVGISVLEMSHRSSDFAKIINNTETLVRELLAVPDNYKVIFLQGGGCGQFSAVPLNLIGLKAGRCADYVVTGAWSAKAAEEAKKFGTINIVHPKLGSYTKIPDPSTWNLNPDASYVYYCANETVHGVEFDFIPDVKGAVLVCDMSSNFLSKPVDVSKFGVIFAGAQKNVGSAGVTVVIVRDDLLGFALRECPSVLEYKVQAGNSSLYNTPPCFSIYVMGLVLEWIKNNGGAAAMEKLSSIKSQTIYEIIDNSQGFYVCPVEPQNRSKMNIPFRIGNAKGDDALEKRFLDKALELNMLSLKGHRSVGGIRASLYNAVTIEDVQKLAAFMKKFLEMHQL

SEQ ID NO: 911 - protein, 370 aa, synthetic construct
MDAPRQVVNFGPGPAKLPHSVLLEIQKELLDYKGVGISVLEMSHRSSDFAKIINNTENLVRELLAVPDNYKVIFLQGGGCGQFSAVPLNLIGLKAGRCADYVVTGAWSAKAAEEAKKFGTINIVHPKLGSYTKIPDPSTWNLNPDASYVYYCANETVHGVEFDFIPDVKGAVLVCDMSSNFLSKPVDVSKFGVIFAGAQKNVGSAGVTVVIVRDDLLGFALRECPSVLEYKVQAGNSSLYNTPPCFSIYVMGLVLEWIKNNGGAAAMEKLSSIKSQTIYEIIDNSQGFYVCPVEPQHRSKMNIPFRIGNAKGDDALEKRFLDKALELNMLSLKGHRSVGGIRASLYNAVTIEDVQKLAAFMKKFLEMHQL

SEQ ID NO: 912 - protein, 370 aa, synthetic construct
MDAPRQVVNFGPGPAKLPHSVLLEIQKELLDYKGVGISVLEMSHRSSDFAKIINNTENLVRELLAVPDNYKVIFLQGGGCGQFSAVPLNLIGLKAGRCADYVVTGAWSAKAAEEAKKFGTINIVHPKLGSYTKIPDPSTWNLNPDASYVYYCANETVHGVEFDFIPDVKGAVLVCDMSSNFLSKPVDVSKFGVIFAGAQKNVGSAGVTVVIVRDDLLGFALRECPSVLEYKVQAGNSSLYNTPPCFSIYVMGLVLEWIKNNGGAAATEKLSSIKSQTIYEIIDNSQGFYVCPVEPQNRSKMNIPFRIGNAKGDDALEKRFLDKALELNMLSLKGHRSVGGIRASLYNAVTIEDVQKLAAFMKKFLEMHQL

SEQ ID NO: 913 - protein, 370 aa, synthetic construct
MDAPTQVVNFGPGPAKLPHSVLLEIQKELLDYKGVGISVLEMSHRSSDFAKIINNTENLVRELLAVPDNYKVIFLQGGGCGQFSAVPLNLIGLKAGRCADYVVTGAWSAKAAEEAKKFGTINIVHPKLGSYTKIPDPSTWNLNPDASYVYYCANETVHGVEFDFIPDVKGAVLVCDMSSNFLSKPVDVSKFGVIFAGAQKNVGSAGVTVVIVRDDLLGFALRECPSVLEYKVQAGNSSLYNTPPCFSIYVMGLVLEWIKNNGGAAAMEKLSSIKSQTIYEIIDNSQGFYVCPVEPQNRSKMNIPFRIGNAKGDDALEKRFLDKALELNMLSLKGHRSVGGIRASLYNAVTIEDVQKLAAFMKKFLEMHQL

SEQ ID NO: 914 - protein, 370 aa, synthetic construct
MDAPRQVVNFGPGPAKLPHSVLLEIQKELLDYKGVGISVLEMSHRSSDFAKIINNTENLVRELLAVPDNYKVIFLQGGGCGQFSAVPLNLIGLKAGRCADYVVTGAWSAKAAEEAKKFGTINIVHPKLGSYTKIPDPSTWNLNPDASYVYYCANETVHGVEFDFIPDVKGAVLVCDMSSNFLSKPADVSKFGVIFAGAQKNVGSAGVTVVIVRDDLLGFALRECPSVLEYKVQAGNSSLYNTPPCFSIYVMGLVLEWIKNNGGAAAMEKLSSIKSQTIYEIIDNSQGFYVCPVEPQNRSKMNIPFRIGNAKGDDALEKRFLDKALELNMLSLKGHRSVGGIRASLYNAVTIEDVQKLAAFMKKFLEMHQL

SEQ ID NO: 915 - protein, 370 aa, synthetic construct
MDAPRQVVNFGPGPAKLPHSVLLEIQKELLDYKGVGISVLEMSHRSSDFAKIINNTEILVRELLAVPDNYKVIFLQGGGCGQFSAVPLNLIGLKAGRCADYVVTGAWSAKAAEEAKKFGTINIVHPKLGSYTKIPDPSTWNLNPDASYVYYCANETVHGVEFDFIPDVKGAVLVCDMSSNFLSKPVDVSKFGVIFAGAQKNVGSAGVTVVIVRDDLLGFALRECPSVLEYKVQAGNSSLYNTPPCFSIYVMGLVLEWIKNNGGAAAMEKLSSIKSQTIYEIIDNSQGFYVCPVEPQNRSKMNIPFRIGNAKGDDALEKRFLDKALELNMLSLKGHRSVGGIRASLYNAVTIEDVQKLAAFMKKFLEMHQL

SEQ ID NO: 916 - protein, 370 aa, synthetic construct
MDAPRQVVNFGPGPAKLPHSVLLEIQTELLDYKGVGISVLEMSHRSSDFAKIINNTENLVRELLAVPDNYKVIFLQGGGCGQFSAVPLNLIGLKAGRCADYVVTGAWSAKAAEEAKKFGTINIVHPKLGSYTKIPDPSTWNLNPDASYVYYCANETVHGVEFDFIPDVKGAVLVCDMSSNFLSKPVDVSKFGVIFAGAQKNVGSAGVTVVIVRDDLLGFALRECPSVLEYKVQAGNSSLYNTPPCFSIYVMGLVLEWIKNNGGAAAMEKLSSIKSQTIYEIIDNSQGFYVCPVEPQNRSKMNIPFRIGNAKGDDALEKRFLDKALELNMLSLKGHRSVGGIRASLYNAVTIEDVQKLAAFMKKFLEMHQL

SEQ ID NO: 917 - protein, 370 aa, synthetic construct
MDAPRQVVNFGPGPAKLPHSVLLEIQKELLDYKGVGISVLEMSHRSSDFAKIINNTENLVRELLAVPDNYKVIFLQGGGCGQFSAVPLNLIGLKAGRCADYVVTGAWSAKAAEEAKKFGTINIVHPKLGSYTKIPDPSTWNLNPDPSYVYYCANETVHGVEFDFIPDVKGAVLVCDMSSNFLSKPVDVSKFGVIFAGAQKNVGSAGVTVVIVRDDLLGFALRECPSVLEYKVQAGNSSLYNTPPCFSIYVMGLVLEWIKNNGGAAAMEKLSSIKSQTIYEIIDNSQGFYVCPVEPQNRSKMNIPFRIGNAKGDDALEKRFLDKALELNMLSLKGHRSVGGIRASLYNAVTIEDVQKLAAFMKKFLEMHQL

SEQ ID NO: 918 - protein, 370 aa, synthetic construct
MDAPRQVVNFGPGPAKLPHSVLLEIQKELLDYKGVGISVLEMSHRSSDFAKIINNTENLVRELLAVPDNYKVIFLQGGGCGQFSAVPLNLIGLKAGRCADYVVTGAWSAKAAEEAKKFGTINIVHPKLGSYTKIPDPSTWNLNPDASYVYYCANETVHGVEFDFIPDVKGAVLVCDMSSNFLSKPVDVSKFGVIFAGAQKNVGSAGVTVVIVRDDLLGFALRECPSVLEYKVQAGNSSLYNTPPCFSIYVMGLVLEWIKNNGGAAAMEKLSSIKSQTIYEIIDNSQGFYVCPVEPQNRSKMNIPFRIANAKGDDALEKRFLDKALELNMLSLKGHRSVGGIRASLYNAVTIEDVQKLAAFMKKFLEMHQL

SEQ ID NO: 919 - protein, 370 aa, synthetic construct
MDAPRQVVNFGPGPAKLPHSVLLEIQKELLDYKGVGISVLEMSHRSSDFAKIINNTENLVRELLAVPDNYKVIFLQGGGCGQFSAVPLNLIGLKAGRCADYVVTGAWSAKAAEEAKKFGTINIVHPKLGSYTIIPDPSTWNLNPDASYVYYCANETVHGVEFDFIPDVKGAVLVCDMSSNFLSKPVDVSKFGVIFAGAQKNVGSAGVTVVIVRDDLLGFALRECPSVLEYKVQAGNSSLYNTPPCFSIYVMGLVLEWIKNNGGAAAMEKLSSIKSQTIYEIIDNSQGFYVCPVEPQNRSKMNIPFRIGNAKGDDALEKRFLDKALELNMLSLKGHRSVGGIRASLYNAVTIEDVQKLAAFMKKFLEMHQL

SEQ ID NO: 920 - protein, 370 aa, synthetic construct
MDAPRQVVNFGPGPAKLPHSVLLEIQKELLDYKGVGISVLEMSHRSSDFAKIINNTENLVRELLAVPDNYKVIFLQGGGCGQFSAVPLNLIGLKAGRCADYVVTGAWSAKAAEEAKKFGTINIVHPKLGSYTKIPDPSTWNLNPDASYVYYCANETVHGVEFDFIPDVKGAVLVCDMSSNFLSKPVDVSKFGVIFAGAQKNVGSAGVTVVIVRDDLLGFALRECPSVLEYKVQAGNSSLYNTPTCFSIYVMGLVLEWIKNNGGAAAMEKLSSIKSQTIYEIIDNSQGFYVCPVEPQNRSKMNIPFRIGNAKGDDALEKRFLDKALELNMLSLKGHRSVGGIRASLYNAVTIEDVQKLAAFMKKFLEMHQL

SEQ ID NO: 921 - protein, 370 aa, synthetic construct
MDAPRQVVNFGPGPAKLPHSVLLEIQKELLDYKGVGISVLEMSHRSSDFAKIINNTENLVRELLAVPDNYKVIFLQGGGCGQFSAVPLNLIGLKAGRCADYVVTGAWSAKAAEEAKKFGTINIVHPKLGSYTKIPDPSTWNLNPDASYVYYCANETVHGVEFDFIPDVKGAVLVCDMSSNFLSKPVDVSKFGVIFAGAQKNVGSAGVTVVIVRDDLLGFALRECPSVLEYKVQAGNSSLYNTPPCFSIYVMVLVLEWIKNNGGAAAMEKLSSIKSQTIYEIIDNSQGFYVCPVEPQNRSKMNIPFRIGNAKGDDALEKRFLDKALELNMLSLKGHRSVGGIRASLYNAVTIEDVQKLAAFMKKFLEMHQL

SEQ ID NO: 922 - protein, 370 aa, synthetic construct
MDAPRQVVNFGPGPAKLPHSVLLEIQKELLDYKGVGISVLEMSHRSSDFAKIINNTENLVRELLAVPDNYKVIFLQGGGCGQFSAVPLNLIGLKAGRCADYVVTGAWSAKAAEEAKKFGTINIVHPKLGSYTKIPDPSTWNLNPDASYVYYCANETVHGVEFDFIPDVKGAVLVCDMSSNFLSKPVDVSKFGVIFAGAQKNVGSAGVTVVIVRDDLLGFALREGPSVLEYKVQAGNSSLYNTPPCFSIYVMGLVLEWIKNNGGAAAMEKLSSIKSQTIYEIIDNSQGFYVCPVEPQNRSKMNIPFRIGNAKGDDALEKRFLDKALELNMLSLKGHRSVGGIRASLYNAVTIEDVQKLAAFMKKFLEMHQL

SEQ ID NO: 923 - protein, 370 aa, synthetic construct
MDAPRQVVNFGPGPAKLPHSVLLEIQKELLDYKGVGISVLEMSHRSSDFAKIINNTENLVRELLAVPDNYKVIFLQGGGCGQFSAVPLNLISLKAGRCADYVVTGAWSAKAAEEAKKFGTINIVHPKLGSYTKIPDPSTWNLNPDASYVYYCANETVHGVEFDFIPDVKGAVLVCDMSSNFLSKPVDVSKFGVIFAGAQKNVGSAGVTVVIVRDDLLGFALRECPSVLEYKVQAGNSSLYNTPPCFSIYVMGLVLEWIKNNGGAAAMEKLSSIKSQTIYEIIDNSQGFYVCPVEPQNRSKMNIPFRIGNAKGDDALEKRFLDKALELNMLSLKGHRSVGGIRASLYNAVTIEDVQKLAAFMKKFLEMHQL

SEQ ID NO: 924 - protein, 370 aa, synthetic construct
MDAPRQVVNFGPGPAKLPHSVLLEIQKELLDYKGVGISVLEMSHRSSDFAKIINNTENLVRELLAVPDNYKVIFLQGGGCVQFSAVPLNLIGLKAGRCADYVVTGAWSAKAAEEAKKFGTINIVHPKLGSYTKIPDPSTWNLNPDASYVYYCANETVHGVEFDFIPDVKGAVLVCDMSSNFLSKPVDVSKFGVIFAGAQKNVGSAGVTVVIVRDDLLGFALRECPSVLEYKVQAGNSSLYNTPPCFSIYVMGLVLEWIKNNGGAAAMEKLSSIKSQTIYEIIDNSQGFYVCPVEPQNRSKMNIPFRIGNAKGDDALEKRFLDKALELNMLSLKGHRSVGGIRASLYNAVTIEDVQKLAAFMKKFLEMHQL

SEQ ID NO: 925 - protein, 370 aa, synthetic construct
MDAPRQVVNFGPGPAKLPHSVLLEIQKELLDYKGVGISVLEMSHRSSDFAKIINNTENLVRELLAVPDNYKVIFLQGGGCGQFSAVPLNLIGLKAGRCADYVVTGAWSAKAAEEAKKFGTINIVHPKLGSYTKIPDPSTWNLNPDASYVYYCANETVHGVEFDFIPDVKGAVLVCDMSSNFLSKPVDVSKFGVIFAGAQKNLGSAGVTVVIVRDDLLGFALRECPSVLEYKVQAGNSSLYNTPPCFSIYVMGLVLEWIKNNGGAAAMEKLSSIKSQTIYEIIDNSQGFYVCPVEPQNRSKMNIPFRIGNAKGDDALEKRFLDKALELNMLSLKGHRSVGGIRASLYNAVTIEDVQKLAAFMKKFLEMHQL

SEQ ID NO: 926 - protein, 370 aa, synthetic construct
MDAPRQVVNFGPGPAKLPHSVLLEIQKELLDYKGVGISVLEMSHRSSDFAKIINNTENLVRELLAVPDNYKVIFLQGGGCGQFSAVPLNLIGLKAGRCADYVVTGAWSAKAAEEAKKFGTINIVHPKLGSYTKIPDPSTWNLNPDASYVYYCANETVHGVEFDFIPDLKGAVLVCDMSSNFLSKPVDVSKFGVIFAGAQKNVGSAGVTVVIVRDDLLGFALRECPSVLEYKVQAGNSSLYNTPPCFSIYVMGLVLEWIKNNGGAAAMEKLSSIKSQTIYEIIDNSQGFYVCPVEPQNRSKMNIPFRIGNAKGDDALEKRFLDKALELNMLSLKGHRSVGGIRASLYNAVTIEDVQKLAAFMKKFLEMHQL

SEQ ID NO: 927 - protein, 370 aa, synthetic construct
MDAPRQVVNFGPGPAKLPHSVLLEIQKELLDYKGVGISVLEMSHRSSDFAKIINNTENLVRELLAVPDNYKVIFLQGGGCGQFSAVPLNLIGLKAGRCADYVVTGAWSAKAAEEAKKFGTINIVHPKLGSYTKIPDPSTWNLNPDASYVYYCANETVHGVEFDFIPDVKGAVLVCDMSSNFLSKPVDVSKFGVIFAGAQKNVGSAGVTVVIVRDDLLGFALRECPSVLEYKVQAGNSSLYNTPPCFSIYVMGLVLEWIKNNGGAAAMEKLSSIKSQTIYEIIDNSQGFYICPVEPQNRSKMNIPFRIGNAKGDDALEKRFLDKALELNMLSLKGHRSVGGIRASLYNAVTIEDVQKLAAFMKKFLEMHQL

SEQ ID NO: 928 - protein, 370 aa, synthetic construct
MDAPRQVVNFGPGPAKLPHSVLLEIQKELLDYKGVGISVLEMSHRSSDFAKIINNTENLVRELLAVPDNYKVIFLQGGGCGQFSAVPLNLIGLKAGRCADYVVAGAWSAKAAEEAKKFGTINIVHPKLGSYTKIPDPSTWNLNPDASYVYYCANETVHGVEFDFIPDVKGAVLVCDMSSNFLSKPVDVSKFGVIFAGAQKNVGSAGVTVVIVRDDLLGFALRECPSVLEYKVQAGNSSLYNTPPCFSIYVMGLVLEWIKNNGGAAAMEKLSSIKSQTIYEIIDNSQGFYVCPVEPQNRSKMNIPFRIGNAKGDDALEKRFLDKALELNMLSLKGHRSVGGIRASLYNAVTIEDVQKLAAFMKKFLEMHQL

SEQ ID NO: 929 - protein, 370 aa, synthetic construct
MDAPRQVVNFGPGPAKLPHSVLLEIQKELLDYKGVGISVLEMSHRSSDFAKIINNTENLVRELLAVPDNYKVIFLQGGGCGQFSAVPLNLIGLKAGRCADYVVTGAWSAKAAEEAKKFGTINIVHPKLGSYTKIPDPSTWNLNPDASYVYYCANETVHGVEFDFIPDVKGAVLVCDMSSNFLSKAVDVSKFGVIFAGAQKNVGSAGVTVVIVRDDLLGFALRECPSVLEYKVQAGNSSLYNTPPCFSIYVMGLVLEWIKNNGGAAAMEKLSSIKSQTIYEIIDNSQGFYVCPVEPQNRSKMNIPFRIGNAKGDDALEKRFLDKALELNMLSLKGHRSVGGIRASLYNAVTIEDVQKLAAFMKKFLEMHQL

SEQ ID NO: 930 - protein, 370 aa, synthetic construct
MDAPRQVVNFGPGPAKLPHSVLLEIQKELLDYKGVGISVLEMSHRSSDFAKIINNTENLVRELLAVPDNYKVIFLQGGGCGQFSAVPLNLIGLKAGRCADYVVTGAWSAKAAEEAKKFGTINIVHPKLGSYTKIPDPSTWNLNPDASYVYYCANETVHGVEFDFIPDVKGAVLVCDMSSNFLSKPVDVSKFGVIFAGAQKNVGSAGVTVVIVRDDLLGFALRECPSVLEYKVQAGNSSLHNTPPCFSIYVMGLVLEWIKNNGGAAAMEKLSSIKSQTIYEIIDNSQGFYVCPVEPQNRSKMNIPFRIGNAKGDDALEKRFLDKALELNMLSLKGHRSVGGIRASLYNAVTIEDVQKLAAFMKKFLEMHQL

SEQ ID NO: 931 - protein, 370 aa, synthetic construct
MDAPRQVVNFGPGPAKLPHSVLLEIQKQLLDYKGVGISVLEMSHRSSDFAKIINNTENLVRELLAVPDNYKVIFLQGGGCGQFSAVPLNLIGLKAGRCADYVVTGAWSAKAAEEAKKFGTINIVHPKLGSYTKIPDPSTWNLNPDASYVYYCANETVHGVEFDFIPDVKGAVLVCDMSSNFLSKPVDVSKFGVIFAGAQKNVGSAGVTVVIVRDDLLGFALRECPSVLEYKVQAGNSSLYNTPPCFSIYVMGLVLEWIKNNGGAAAMEKLSSIKSQTIYEIIDNSQGFYVCPVEPQNRSKMNIPFRIGNAKGDDALEKRFLDKALELNMLSLKGHRSVGGIRASLYNAVTIEDVQKLAAFMKKFLEMHQL

SEQ ID NO: 932 - protein, 370 aa, synthetic construct
MDAPRQVVNFGPGPAKLPHSVLLEIQKELLDYKGVGISVLEMSHRSSDFAKIINNTENLVRELLAVPDNYKVIFLQGGGCGQFSAVPLNLIGLKAGRCADYVVTGAWSAKAAEEAKKFGTINIVHPKLGSYTKIPDPSTWNLNPDASYVYYCANETVHGVEFDFIPDVKGAVLVCDMSSNFLSKPVDVSKFGVIFAGAQKNVGSAGVTVVIVRDDLLGFALRECPSVLEYKVQAGNSSLYNTPPCFSIYVMGLVLEWIKNNGGAAAMEKLSSIKSQTIYEIIDNSQGFYVCPVEPQNRSKMNIPFRIGNAKGDDALEKRFLDKALELNMLSLKGHRSVGGIRASMYNAVTIEDVQKLAAFMKKFLEMHQL

SEQ ID NO: 933 - protein, 370 aa, synthetic construct
MDAPRQVVNFGPGPAKLPHSVLLEIQKELLDYKGVRISVLEMSHRSSDFAKIINNTENLVRELLAVPDNYKVIFLQGGGCGQFSAVPLNLIGLKAGRCADYVVTGAWSAKAAEEAKKFGTINIVHPKLGSYTKIPDPSTWNLNPDASYVYYCANETVHGVEFDFIPDVKGAVLVCDMSSNFLSKPVDVSKFGVIFAGAQKNVGSAGVTVVIVRDDLLGFALRECPSVLEYKVQAGNSSLYNTPPCFSIYVMGLVLEWIKNNGGAAAMEKLSSIKSQTIYEIIDNSQGFYVCPVEPQNRSKMNIPFRIGNAKGDDALEKRFLDKALELNMLSLKGHRSVGGIRASLYNAVTIEDVQKLAAFMKKFLEMHQL

SEQ ID NO: 934 - protein, 370 aa, synthetic construct
MDAPRQVVNFGPGPAKLPHSVLLEIQKELLDYKGVGISVLEMSHRSSDFAKIINNTENLVRELLAVPDNYKVIFLQGGGCGQFSAVPLNLIGLKAGRCADYVVTGAWSAKAAEEAKKFGTINIVHPKLGSYTKIPDPSTWNLNPDASYVYYCANETVHGVEFDFIPDVKGAVLVCDMSSNFLSKPVDVSKFGVIFAGVQKNVGSAGVTVVIVRDDLLGFALRECPSVLEYKVQAGNSSLYNTPPCFSIYVMGLVLEWIKNNGGAAAMEKLSSIKSQTIYEIIDNSQGFYVCPVEPQNRSKMNIPFRIGNAKGDDALEKRFLDKALELNMLSLKGHRSVGGIRASLYNAVTIEDVQKLAAFMKKFLEMHQL

SEQ ID NO: 935 - protein, 370 aa, synthetic construct
MDAPRQVVNFGPGPAKLPHSVLLEIQKELLDYKGVGISVLEMSHRSSDFAKIINNTENLVRELLAVPDNYKVIFLQGGGCGQFSAVPLNLIGLKAGRCADYVVTGAWSAKAAEEAKKFGTINIVHPKLGSYTKIPDPSTWNLNPDASYVYYCANETVHGVEFDFIPDVKGAVLVCDMSSNFLSKPVDVSKFGVIFAGAQKNVGSAGVTVVIVRDDLLGFALRECPSVLEYKVQAGNSSLYNTPPCFSIYVMGLVLEWIKNNGGAAAMEKLSTIKSQTIYEIIDNSQGFYVCPVEPQNRSKMNIPFRIGNAKGDDALEKRFLDKALELNMLSLKGHRSVGGIRASLYNAVTIEDVQKLAAFMKKFLEMHQL

SEQ ID NO: 936 - protein, 370 aa, synthetic construct
MDAPRQVVNFGPGPAKLPHSVLLEIQKELLDYKGVGISVLEMSHRSSDFAKIINNTENLVRELLAVPDNYKVIFLQGGGCGQFSAVPLNLIGLKAGRCADYVVTGAWSAKAAEEAKKFGTINIVHPKLGSYTKIPDPSTWNLNPDASYVYYCANETVHGVEFDFIPDVKGAVLVCDMSSNFLSKPVDVSKFGVIFAGAQKNVGSAGVTVVIVRDDLLGFALRECPSVLEYKVQAGNSSLYNTPPCFSIYVMGLVLEWIKNNGGAAAMEKLSSIKSQTIYEIIDNSQGFYVCPVEPQNRSKMNIPFRIGNAKGDDALEKRFLDKALELNMLSLIGHRSVGGIRASLYNAVTIEDVQKLAAFMKKFLEMHQL

SEQ ID NO: 937 - protein, 370 aa, synthetic construct
MDAPRQVVNFGPGPAKLPHSVLLEIQKELLDYKGVGISVLEMSHRSSDFAKIINNTENLVRELLAVPDNYKVIFLQGGGCGQFSAVPLNLIGLKAGRCADYVVTGAWSAKAAEEAKKFGTINIVHPKLGSYTKIPDPSTWNLNPDASYVYYCANETVHGVEFDFIPDVKGAVLVCDMSSNFLSKPVDVSKFGVIFAGAQKNVGSAGVTVVIVRDDLLGFALRECPSVLEYKVQAGNSSLYNTPPCFSIYVMGLVLEWIKNNGGAAAMEKLSSIKSQTIYEIIDNSQGFYVCPVEPQNRSKMNIPFRIGNAKGDDALEKRFLDKALELNMLSLKGHRSVGGMRASLYNAVTIEDVQKLAAFMKKFLEMHQL

SEQ ID NO: 938 - protein, 370 aa, synthetic construct
MDAPRQVVNFGPGPAKLPHSVLLEIQKELLDYKGVGISVLEMSHRSSDFAKIINNTENLVRELLAVPDNYKVIFLQGGGCGQFSAVPLNLIGLKAGRCADYVVTGAWSAKAAEEAKKFGTINIVHPKLGSYTKIPDPSTWNLNPDASYVYYCANETVHGVEFDFIPDVKGAVLVCDMSSNFLSKPVDVSKFGVIFAGAQKNVGSAGVTVVIVRDDLLGFALRECPSVLEYKVQAGNSSLYNTPPCFSIYVMGLVLEWIKNNGSAAAMEKLSSIKSQTIYEIIDNSQGFYVCPVEPQNRSKMNIPFRIGNAKGDDALEKRFLDKALELNMLSLKGHRSVGGIRASLYNAVTIEDVQKLAAFMKKFLEMHQL

SEQ ID NO: 939 - protein, 370 aa, synthetic construct
MDAPRQVVNFGPGPAKLPHSVLLEIQKELLDYKGVGISVLEMSHRSSDFAKIINNTENLVRELLAVPDNYKVIFLQGGGCGQFSAVPLNLIGLKAGRCADYVVTGAWSAKAAEEAKKFGTINIVHPKLGSYTKIPDPSTWNLNPDASYVYYCANETVHGVEFDFIPDVKGAVLVCDMSSNFLSKPVDVSKFGVIFAGAQKNVGSAGVTVVIVRDDLLGFALRECPSVLEYKVQAGNSSLYNTPPCFSIYVMGLVLEWIKNNGGAAAMEKLSSIKSQTIYGIIDNSQGFYVCPVEPQNRSKMNIPFRIGNAKGDDALEKRFLDKALELNMLSLKGHRSVGGIRASLYNAVTIEDVQKLAAFMKKFLEMHQL

SEQ ID NO: 940 - protein, 370 aa, synthetic construct
MDAPRQVVNFGPGPAKLPHSVLLEIQKELLDYKGVGISVLEMSHRSSDFAKIINNTENLVRELLAVPDNYKVIFLQGGGCGQFSAVPLNLIGLKAGRCADYVVTGAWSAKAAEEAKKFGTINIVHPKLGSYTKIPDPSTWNLNPDASYVYYCANETVHGVEFDFIPDVKGAVLVCDMSSNFLSKPVDVSKFGVIFAGAQKNVGSAGVTVVIVRDDLLGFALRECPSVLEYKVQAGNSSLYNTPPCFSIYVMGLVLEWIKNNGGAAAMEKLSSITSQTIYEIIDNSQGFYVCPVEPQNRSKMNIPFRIGNAKGDDALEKRFLDKALELNMLSLKGHRSVGGIRASLYNAVTIEDVQKLAAFMKKFLEMHQL

SEQ ID NO: 941 - protein, 370 aa, synthetic construct
MDAPRQVVNFGPGPAKLPHSVLLEIQKELLDYKGVGISVLEMSHRSSDFAKIINNTENLVRELLAVPDNYKVIFLQGGGCGQFSAVPLNLIGLKAGRCADYVVTGAWSAKAAEEAKKFGTINIVHPKLGSYTKIPDPSTWNLNPDASYVYYCANETVHGVEFDFTPDVKGAVLVCDMSSNFLSKPVDVSKFGVIFAGAQKNVGSAGVTVVIVRDDLLGFALRECPSVLEYKVQAGNSSLYNTPPCFSIYVMGLVLEWIKNNGGAAAMEKLSSIKSQTIYEIIDNSQGFYVCPVEPQNRSKMNIPFRIGNAKGDDALEKRFLDKALELNMLSLKGHRSVGGIRASLYNAVTIEDVQKLAAFMKKFLEMHQL

SEQ ID NO: 942 - protein, 370 aa, synthetic construct
MAAPRQVVNFGPGPAKLPHSVLLEIQKELLDYKGVGISVLEMSHRSSDFAKIINNTENLVRELLAVPDNYKVIFLQGGGCGQFSAVPLNLIGLKAGRCADYVVTGAWSAKAAEEAKKFGTINIVHPKLGSYTKIPDPSTWNLNPDASYVYYCANETVHGVEFDFIPDVKGAVLVCDMSSNFLSKPVDVSKFGVIFAGAQKNVGSAGVTVVIVRDDLLGFALRECPSVLEYKVQAGNSSLYNTPPCFSIYVMGLVLEWIKNNGGAAAMEKLSSIKSQTIYEIIDNSQGFYVCPVEPQNRSKMNIPFRIGNAKGDDALEKRFLDKALELNMLSLKGHRSVGGIRASLYNAVTIEDVQKLAAFMKKFLEMHQL

SEQ ID NO: 943 - protein, 370 aa, synthetic construct
MDAPRQVVNFGPGPAKLPHSVLLEIQKELLDYKGVGISVLEMSHRSSDFAKIINNTENLVRELLAVPDNYKVIFLQGGGCGQFSAVPLNLIGLKAGRCADYVVTGAWSAKAAEEAKKFGTINIVHPKLGSYTKIPDPSTWNLNPDASYVYYCANETVHGVEFDFIPDVKGAVLVCDMSSNFLSKPVDVSKFGVIFAGAQKNVGSAGVTVVIVRDDLLGFALRECPSVLEYKVQAGNSSLYNTPPCFSIYVMGLVLEWIKNNGGAAAMEKLSSIKSQTIYEIIDNSQGFYVCPVEPHNRSKMNIPFRIGNAKGDDALEKRFLDKALELNMLSLKGHRSVGGIRASLYNAVTIEDVQKLAAFMKKFLEMHQL

SEQ ID NO: 944 - protein, 370 aa, synthetic construct
MDAPRQVVNFGPGPAKLPHSVLLEIQKELLDYKGVGISVLEMSHRSSDFAKIINNTENLVRELLAVPDNYKVIFLQGGGCGQFSAVPLNLIGLKAGRCADYVVTGAWSDKAAEEAKKFGTINIVHPKLGSYTKIPDPSTWNLNPDASYVYYCANETVHGVEFDFIPDVKGAVLVCDMSSNFLSKPVDVSKFGVIFAGAQKNVGSAGVTVVIVRDDLLGFALRECPSVLEYKVQAGNSSLYNTPPCFSIYVMGLVLEWIKNNGGAAAMEKLSSIKSQTIYEIIDNSQGFYVCPVEPQNRSKMNIPFRIGNAKGDDALEKRFLDKALELNMLSLKGHRSVGGIRASLYNAVTIEDVQKLAAFMKKFLEMHQL

SEQ ID NO: 945 - protein, 370 aa, synthetic construct
MDAPRQVVNFGPGPAKLPHSVLLEIQKELLDYKGVGISVLEMSHRSSDFAKIINNTENLVRELLAVPDNYKVIFLQGGGCGQFSAVPLNLIGLKAGRCADYVVTGAWSAKAAEVAKKFGTINIVHPKLGSYTKIPDPSTWNLNPDASYVYYCANETVHGVEFDFIPDVKGAVLVCDMSSNFLSKPVDVSKFGVIFAGAQKNVGSAGVTVVIVRDDLLGFALRECPSVLEYKVQAGNSSLYNTPPCFSIYVMGLVLEWIKNNGGAAAMEKLSSIKSQTIYEIIDNSQGFYVCPVEPQNRSKMNIPFRIGNAKGDDALEKRFLDKALELNMLSLKGHRSVGGIRASLYNAVTIEDVQKLAAFMKKFLEMHQL

SEQ ID NO: 946 - protein, 370 aa, synthetic construct
MDAPRQVVNFGPGPAKLPHSVLLEIQKELLDYKGVGISVLEMSHRSSDFAKIINNTENLVRELLAVPDNYKVIFLQGGGCGQFSAVPLNLIGLKAGRCADYVVTGAWSAKAAEEAKKFGTINIVHPKLGSYTKIPDPSTWNLNPDASYVYYCANETVHGVEFDFIPDVKGAVLVCDMSSNFLSKPVDVSKFGVIFAGAQKNVGSAGVTVVIVRDDLLGFALRECPSVLEYKVQAGNSSLYNTPPCFSIYVMGLVLEWIKNNGGAAAMEKLSSIKSQTIYEIIDNSQGFYVCPVEPQNRSKMNIPFRIGNAKGDDALEKRFLDKALELNMLSLKGHRSVGGIRASLYNAVTIEDVHKLAAFMKKFLEMHQL

SEQ ID NO: 947 - protein, 370 aa, synthetic construct
MDAPRQVVNFGPGPAKLPHSVLLEIQKELLDYKGVGISVLEMSHRSSDFAKIINNTENLVRELLAVPDNYKVIFLQGGGCGQFSAVPLNLIGLKAGRCADYVVTGAWSAKAAEEAKKFGTINIVHPKLGSYTKIPDPSTWNLNPDASYVYYCANETVHGVEFDFIPDVKGAVLVCDMSSNFLSKPVDVSKFGVIFAGAQKNVGSAGVTVVIVRDDLLGFALRECPSVLEYKVQAGNSSLYNTPPCFSIYVMGLVLEWIKNNGGAAAMEKLSSIKSQTIYEIIDNSQGFYVCPVEPQNRSKMNIPFRIGNAKGDDALEERFLDKALELNMLSLKGHRSVGGIRASLYNAVTIEDVQKLAAFMKKFLEMHQL

SEQ ID NO: 948 - protein, 370 aa, synthetic construct
MDAPRQVVNFGPGPAKLPHSVLLEIQKELLDYKGVGISVLEMSHRSSDFAKIINNTENLVRELLAVPDNYKVIFLQGGGCGQFSAVPLNLIGLKAGRCADYVVTGAWSAKAAEEAKKFGTINIVHPKLGSYTKIPDPSTWNLNPDASYVYYCANETVHGVEFDFIPDVKGAVLVCDMSSNFLSKPVDVSKFGVIFAGAQKNVGSAGVTVVIVRDDLLGFALRECPSVLEYKVQAGNSSLYNTPPCFSIYVMGLILEWIKNNGGAAAMEKLSSIKSQTIYEIIDNSQGFYVCPVEPQNRSKMNIPFRIGNAKGDDALEKRFLDKALELNMLSLKGHRSVGGIRASLYNAVTIEDVQKLAAFMKKFLEMHQL

SEQ ID NO: 949 - protein, 370 aa, synthetic construct
MDAPRQVVNFGPGPAKLPHSVLLEIQKELLDYKGVGISVLEMSHRSSDFAKIINNTENLVRELLAVPDNYKVIFLQGGGCGQFSAVPLNLIGLKAGRCADYVVTGAWSAKAAEEAKKFGTINIVHPKLGSYTKIPDPSTWNLNPDASYVYYCANETVHGVEFDFIPDVKGAVLVCDMSSNFLSKPVDVSKFGVIFAGAQKNVGSAGVTVVIVRDDLLGFALRECPSVLEYKVQAGNSSLYNTPPCFSIYVMGLVLEWIKNNGGAAAMEKLSSIKSQTIYEIIDNSQGFYVCPVEPQNRSKMNIPFRIGNAKGDDALEKRFLVKALELNMLSLKGHRSVGGIRASLYNAVTIEDVQKLAAFMKKFLEMHQL

SEQ ID NO: 950 - protein, 370 aa, synthetic construct
MDAPRQVVNFGPGPAKLPHSVLLEIQKELLDYKGVGISVLEMSHRSSDFAKIINNTENLVRELLAVPDNYKVIFLQGGGCGQFSAVPLNLIGLKAGRCADYVVTGAWSAKAAEEAKKFGTINIVHPKLGSYTKIPDPSTWNLNPDASYVYYCSNETVHGVEFDFIPDVKGAVLVCDMSSNFLSKPVDVSKFGVIFAGAQKNVGSAGVTVVIVRDDLLGFALRECPSVLEYKVQAGNSSLYNTPPCFSIYVMGLVLEWIKNNGGAAAMEKLSSIKSQTIYEIIDNSQGFYVCPVEPQNRSKMNIPFRIGNAKGDDALEKRFLDKALELNMLSLKGHRSVGGIRASLYNAVTIEDVQKLAAFMKKFLEMHQL

SEQ ID NO: 951 - protein, 370 aa, synthetic construct
MDAPRQVVNFGPGPAKLPHSVLLEIQKELLDYKGVGISVLEMSHRSSDFAKIINNTENLVRELLAVPDNYKVIFLQGGGCGQFSAVPLNLIGLKAGRYADYVVTGAWSAKAAEEAKKFGTINIVHPKLGSYTKIPDPSTWNLNPDASYVYYCANETVHGVEFDFIPDVKGAVLVCDMSSNFLSKPVDVSKFGVIFAGAQKNVGSAGVTVVIVRDDLLGFALRECPSVLEYKVQAGNSSLYNTPPCFSIYVMGLVLEWIKNNGGAAAMEKLSSIKSQTIYEIIDNSQGFYVCPVEPQNRSKMNIPFRIGNAKGDDALEKRFLDKALELNMLSLKGHRSVGGIRASLYNAVTIEDVQKLAAFMKKFLEMHQL

SEQ ID NO: 952 - protein, 370 aa, synthetic construct
MDAPRQVVNFGPGPAKLPHSVLLEIQKELLDYKGVGISVLEMSHRSSDFAKIINNTENLVRELLAVPDNYKVIFLQGGGCGQFSAVPLNLIGLKAGRCADYVVTGAWSAKAAEEAKKFGTINIVHPKLGSYTKIPDPSTWNLNPDASYVYYCANETVHGVEFDFIPDVKGAVLVCDMSSNFLSKPVDVSKFGVIFAGAQKNVGSAGVTVVIVRDYLLGFALRECPSVLEYKVQAGNSSLYNTPPCFSIYVMGLVLEWIKNNGGAAAMEKLSSIKSQTIYEIIDNSQGFYVCPVEPQNRSKMNIPFRIGNAKGDDALEKRFLDKALELNMLSLKGHRSVGGIRASLYNAVTIEDVQKLAAFMKKFLEMHQL

SEQ ID NO: 953 - protein, 370 aa, synthetic construct
MDAPRQVVNFGPGPAKLPHSVLLEIQKELLDYKGVGISVLEMSHRSSDFAKIINNTENLVRELLAVPDNYKVNFLQGGGCGQFSAVPLNLIGLKAGRCADYVVTGAWSAKAAEEAKKFGTINIVHPKLGSYTKIPDPSTWNLNPDASYVYYCANETVHGVEFDFIPDVKGAVLVCDMSSNFLSKPVDVSKFGVIFAGAQKNVGSAGVTVVIVRDDLLGFALRECPSVLEYKVQAGNSSLYNTPPCFSIYVMGLVLEWIKNNGGAAAMEKLSSIKSQTIYEIIDNSQGFYVCPVEPQNRSKMNIPFRIGNAKGDDALEKRFLDKALELNMLSLKGHRSVGGIRASLYNAVTIEDVQKLAAFMKKFLEMHQL

SEQ ID NO: 954 - protein, 370 aa, synthetic construct
MDAPRQVVNFGPGPAKLPHSVLLEIQKELLDYKGVGISVLEMSHRSSDFAKIINNTENLVRELLAVPDNYKVIFLQGGGCGQFSAVPLNLIGLKAGRCADYVVTGAWSAKAAEEAKKFGTINIVHPKLGSYTKIPDPSTWNLNPDASYVYYCANETVHGVEFDFIPDVKGAVLVCDMSSNFLSKPVDVSKFGVIFAGAQKNVGSAGVTVVIVRDDLLGFALRECPSVLEYKVQAGNSSLYTTPPCFSIYVMGLVLEWIKNNGGAAAMEKLSSIKSQTIYEIIDNSQGFYVCPVEPQNRSKMNIPFRIGNAKGDDALEKRFLDKALELNMLSLKGHRSVGGIRASLYNAVTIEDVQKLAAFMKKFLEMHQL

SEQ ID NO: 955 - protein, 370 aa, synthetic construct
MDAPRQVVNFGPGPAKLPHSVLLEIQKELLDYKGVGISVLEMSHRSSDFAKIINNTENLVRELLAVPDNYKVIFLQGGGCGQFSAVPLNLIGLKAGRCADYVVTGAWSAKAAEEAKKFGTINIVHPKLGSYTKIPDPSTWHLNPDASYVYYCANETVHGVEFDFIPDVKGAVLVCDMSSNFLSKPVDVSKFGVIFAGAQKNVGSAGVTVVIVRDDLLGFALRECPSVLEYKVQAGNSSLYNTPPCFSIYVMGLVLEWIKNNGGAAAMEKLSSIKSQTIYEIIDNSQGFYVCPVEPQNRSKMNIPFRIGNAKGDDALEKRFLDKALELNMLSLKGHRSVGGIRASLYNAVTIEDVQKLAAFMKKFLEMHQL

SEQ ID NO: 956 - protein, 370 aa, synthetic construct
MDAPRQVVNFGPGPAKLPHSVLLEIQKELLDYKGVGISVLEMSHRSSDFAKIINNTENLVRELLAVPDNYKVIFLQGGGCGQFSAVPLNLIGLKAGRCADYVVTGAWSAKAAEEAKKFGTINIVHPKLGSYTKIPDPSTWNLNPDASYVYYCANETVHGVEFDFIPDVKGAVLVCDMSSNFLSKPVDVSKFGVIFAGAQKNVGSAGVTVVIVRDDLLGFALRECPSVLEYKVQAGNSSLYNTPPCFSIYVMGLVLEWIKNNGGAAAMEKLSSIKSQTIYEIIDNSQGFYVCPVEPQNRSKMNIPFRIGNAKGDDALEKRFLDKALELNMLSLKGHRSVGGIRASLYNAVTIEDVQKLAAFMKNFLEMHQL

SEQ ID NO: 957 - protein, 370 aa, synthetic construct
MDAPRQVVNFGPGPAKLPHSVLLEIQKELLDYKGLGISVLEMSHRSSDFAKIINNTENLVRELLAVPDNYKVIFLQGGGCGQFSAVPLNLIGLKAGRCADYVVTGAWSAKAAEEAKKFGTINIVHPKLGSYTKIPDPSTWNLNPDASYVYYCANETVHGVEFDFIPDVKGAVLVCDMSSNFLSKPVDVSKFGVIFAGAQKNVGSAGVTVVIVRDDLLGFALRECPSVLEYKVQAGNSSLYNTPPCFSIYVMGLVLEWIKNNGGAAAMEKLSSIKSQTIYEIIDNSQGFYVCPVEPQNRSKMNIPFRIGNAKGDDALEKRFLDKALELNMLSLKGHRSVGGIRASLYNAVTIEDVQKLAAFMKKFLEMHQL

SEQ ID NO: 958 - protein, 370 aa, synthetic construct
MDAPRQVVNFGPGPAKLPHSVLLEIQKELLDYKGVGISVLEMSHRSSDFAKIINNTENLVRELLAVPDNYKVIFLQGGGCGQFSAVPLNLIGLKAGRCADYVVTGAWSAKAAEEAKKFGPINIVHPKLGSYTKIPDPSTWNLNPDASYVYYCANETVHGVEFDFIPDVKGAVLVCDMSSNFLSKPVDVSKFGVIFAGAQKNVGSAGVTVVIVRDDLLGFALRECPSVLEYKVQAGNSSLYNTPPCFSIYVMGLVLEWIKNNGGAAAMEKLSSIKSQTIYEIIDNSQGFYVCPVEPQNRSKMNIPFRIGNAKGDDALEKRFLDKALELNMLSLKGHRSVGGIRASLYNAVTIEDVQKLAAFMKKFLEMHQL

SEQ ID NO: 959 - protein, 370 aa, synthetic construct
MDAPRQVVNFGPGPAKLPHSVLLEIQKELLDYKGVGISVLEMSHRSSDFAKIINNTENLVRELLAVPDNYKVIFLQGGGCGQFSAVPLNLIGLKAGRCADYVVTGAWSAKAAEEAKKFGTINIVHPKLGSYTKIPDPSTWNLNPDASYVYYCANETVHGVEFDFIPDVKGAVLVCDMSSNFLSKPVDVSKFGVIFAGAQKNVGSAGVTVVIVRDDLLGFALRECPSVLEYKVQAGNSSLYNTPPCFSIYVMGLVLEWIKNNGGAAAMEKLSSIKSQTIYEVIDNSQGFYVCPVEPQNRSKMNIPFRIGNAKGDDALEKRFLDKALELNMLSLKGHRSVGGIRASLYNAVTIEDVQKLAAFMKKFLEMHQL

SEQ ID NO: 960 - protein, 370 aa, synthetic construct
MDAPRQVVNFGPGPAKLPHSVLLEIQKELLDYKGVGISVLEMSHRSSDFAKIINNTENLVRELLAVPDNYKVIFLQGGGCGQFSAVPLNLIGLKAGRCADYVVTGAWSAKAAEEAKKFGTINIVHPKLGSYTKIPDPSTWNLNPDASYVYYCANETVHGVEFDFIPDVKGAVLVCDMSSNFLSKPVDVSKFGVIFAGAQKNVGSAGVTVVIVRDDLLGFALRECSSVLEYKVQAGNSSLYNTPPCFSIYVMGLVLEWIKNNGGAAAMEKLSSIKSQTIYEIIDNSQGFYVCPVEPQNRSKMNIPFRIGNAKGDDALEKRFLDKALELNMLSLKGHRSVGGIRASLYNAVTIEDVQKLAAFMKKFLEMHQL

SEQ ID NO: 961 - protein, 370 aa, synthetic construct
MDAPRQVVNFGPGPAKLPHSVLLEIQKELLDYKGVGISVLEMSHRSSDFAKIINNTENLVRELLAVPDNYKVIFLQGGGCGQFSAVPLNLIGLKAGRCADYVVTGAWSAKAAEEAKKFGTINIVHPKLGSYTKIPDPSTWNLNPDASYVYYCANETVHGVEFDFIPDVKGAVLVCDMSSNFLSKPVDVSKFGVIFAGAQKNVGSAGVTVVIIRDDLLGFALRECPSVLEYKVQAGNSSLYNTPPCFSIYVMGLVLEWIKNNGGAAAMEKLSSIKSQTIYEIIDNSQGFYVCPVEPQNRSKMNIPFRIGNAKGDDALEKRFLDKALELNMLSLKGHRSVGGIRASLYNAVTIEDVQKLAAFMKKFLEMHQL

SEQ ID NO: 962 - protein, 370 aa, synthetic construct
MDAPRQVVNFGPGPAKLPHSVLLEIQKELLDYKGVGISVLEMSHRSSDFAKIINNTENLVRELLAVPDNYKVIFLQGGGCGQFSAVPLNLIGLKAGRCADYVVTGAWSSKAAEEAKKFGTINIVHPKLGSYTKIPDPSTWNLNPDASYVYYCANETVHGVEFDFIPDVKGAVLVCDMSSNFLSKPVDVSKFGVIFAGAQKNVGSAGVTVVIVRDDLLGFALRECPSVLEYKVQAGNSSLYNTPPCFSIYVMGLVLEWIKNNGGAAAMEKLSSIKSQTIYEIIDNSQGFYVCPVEPQNRSKMNIPFRIGNAKGDDALEKRFLDKALELNMLSLKGHRSVGGIRASLYNAVTIEDVQKLAAFMKKFLEMHQL

SEQ ID NO: 963 - protein, 370 aa, synthetic construct
MDAPRQVVNFGPGPAKLPHSVLLEIQKELLDYKGVGISVLEMSHRSSDFAKIINNTENLVRELLAVPGNYKVIFLQGGGCGQFSAVPLNLIGLKAGRCADYVVTGAWSAKAAEEAKKFGTINIVHPKLGSYTKIPDPSTWNLNPDASYVYYCANETVHGVEFDFIPDVKGAVLVCDMSSNFLSKPVDVSKFGVIFAGAQKNVGSAGVTVVIVRDDLLGFALRECPSVLEYKVQAGNSSLYNTPPCFSIYVMGLVLEWIKNNGGAAAMEKLSSIKSQTIYEIIDNSQGFYVCPVEPQNRSKMNIPFRIGNAKGDDALEKRFLDKALELNMLSLKGHRSVGGIRASLYNAVTIEDVQKLAAFMKKFLEMHQL

SEQ ID NO: 964 - protein, 370 aa, synthetic construct
MDAPRQVVNFGPGPAKLPHSVLLEIQKELLDYKGVGISVLEMSHRSSDFAKIINNTENLVRELLAVPDNYKVIFLQGGGCGQFSAVPLNLIGLKAGRCADYVVTGAWSAKAAEEAKKFGTINIVHPKLGSYTKIPDPSTWNLNPDASYVYYCANETVHGVEFDFIPDVKGAVLVCDMSSNFLSKPVDVSKFGVIFAGAQKNVGSAGVTVVIVRDDLLGFALRECPSVLEYKVQAGNSSLYNTPPCFSIYVMGLVLEWIKNNGGAAAMEKLSSIQSQTIYEIIDNSQGFYVCPVEPQNRSKMNIPFRIGNAKGDDALEKRFLDKALELNMLSLKGHRSVGGIRASLYNAVTIEDVQKLAAFMKKFLEMHQL

SEQ ID NO: 965 - protein, 370 aa, synthetic construct
MDAPRQVVNFGPGPAKLPHSVLLEIQKELLDYKGVGISVLEMSHRSSDFAKIINNTENLVRELLAVPDNYKVIFLQGGGCGQFSAVPLNLIGLKAGRCADYVVTGAWSAKAAEEAKKFGTINIVHPKLGSYTKIPDPSTWNLNPDASYVYYCANETVHGVEFDFIPDVKGAVLVCDMSSNFLSKPVDVSKFGVIFAGAQKNVGSAGVTVVIVRDDLLGFAPRECPSVLEYKVQAGNSSLYNTPPCFSIYVMGLVLEWIKNNGGAAAMEKLSSIKSQTIYEIIDNSQGFYVCPVEPQNRSKMNIPFRIGNAKGDDALEKRFLDKALELNMLSLKGHRSVGGIRASLYNAVTIEDVQKLAAFMKKFLEMHQL

SEQ ID NO: 966 - protein, 370 aa, synthetic construct
MDAPRQVVNFGPGPAKLPHSVLLEIQKELLDYKGVGISVLEMSHRSSDFAKIINNTENLVRELLAVPDNYKVIFLQGGGCGQFSAVPLNLIGLKAGRCADYVVTGAWSAKAAEEAKKFGTINIVHPKLGSYTKIPDPSTWNLNPDASYVYYCANETVHGVEFDFIPDVKGAVLVCDMSSNFLSKPVDVSKFGVIFAGAQKNVGSAGVTVVIVRDGLLGFALRECPSVLEYKVQAGNSSLYNTPPCFSIYVMGLVLEWIKNNGGAAAMEKLSSIKSQTIYEIIDNSQGFYVCPVEPQNRSKMNIPFRIGNAKGDDALEKRFLDKALELNMLSLKGHRSVGGIRASLYNAVTIEDVQKLAAFMKKFLEMHQL

SEQ ID NO: 967 - protein, 370 aa, synthetic construct
MDAPRQVVNFGPGPAKLPHSVLLEIQKELFDYKGVGISVLEMSHRSSDFAKIINNTENLVRELLAVPDNYKVIFLQGGGCGQFSAVPLNLIGLKAGRCADYVVTGAWSAKAAEEAKKFGTINIVHPKLGSYTKIPDPSTWNLNPDASYVYYCANETVHGVEFDFIPDVKGAVLVCDMSSNFLSKPVDVSKFGVIFAGAQKNVGSAGVTVVIVRDDLLGFALRECPSVLEYKVQAGNSSLYNTPPCFSIYVMGLVLEWIKNNGGAAAMEKLSSIKSQTIYEIIDNSQGFYVCPVEPQNRSKMNIPFRIGNAKGDDALEKRFLDKALELNMLSLKGHRSVGGIRASLYNAVTIEDVQKLAAFMKKFLEMHQL

SEQ ID NO: 968 - protein, 370 aa, synthetic construct
MDAPRQVVNFGPGPAKLPHSVLLVIQKELLDYKGVGISVLEMSHRSSDFAKIINNTENLVRELLAVPDNYKVIFLQGGGCGQFSAVPLNLIGLKAGRCADYVVTGAWSAKAAEEAKKFGTINIVHPKLGSYTKIPDPSTWNLNPDASYVYYCANETVHGVEFDFIPDVKGAVLVCDMSSNFLSKPVDVSKFGVIFAGAQKNVGSAGVTVVIVRDDLLGFALRECPSVLEYKVQAGNSSLYNTPPCFSIYVMGLVLEWIKNNGGAAAMEKLSSIKSQTIYEIIDNSQGFYVCPVEPQNRSKMNIPFRIGNAKGDDALEKRFLDKALELNMLSLKGHRSVGGIRASLYNAVTIEDVQKLAAFMKKFLEMHQL

SEQ ID NO: 969 - protein, 370 aa, synthetic construct
MDAPRQVVNFGPGPAKLPHSVLLEIQKELLDYKGVGISVLEMSHRSSDFAKIINNTENLVRELVAVPDNYKVIFLQGGGCGQFSAVPLNLIGLKAGRCADYVVTGAWSAKAAEEAKKFGTINIVHPKLGSYTKIPDPSTWNLNPDASYVYYCANETVHGVEFDFIPDVKGAVLVCDMSSNFLSKPVDVSKFGVIFAGAQKNVGSAGVTVVIVRDDLLGFALRECPSVLEYKVQAGNSSLYNTPPCFSIYVMGLVLEWIKNNGGAAAMEKLSSIKSQTIYEIIDNSQGFYVCPVEPQNRSKMNIPFRIGNAKGDDALEKRFLDKALELNMLSLKGHRSVGGIRASLYNAVTIEDVQKLAAFMKKFLEMHQL

SEQ ID NO: 970 - protein, 370 aa, synthetic construct
MDAPRQVVNFGPGPAKLPHSVLLEIQKELLDYKGVGISVLEMSHRSSDFAKIINNTENLVRELLAVPDNYKVIFLQGGGCGQFSAVPLNLIGLKAGRCANYVVTGAWSAKAAEEAKKFGTINIVHPKLGSYTKIPDPSTWNLNPDASYVYYCANETVHGVEFDFIPDVKGAVLVCDMSSNFLSKPVDVSKFGVIFAGAQKNVGSAGVTVVIVRDDLLGFALRECPSVLEYKVQAGNSSLYNTPPCFSIYVMGLVLEWIKNNGGAAAMEKLSSIKSQTIYEIIDNSQGFYVCPVEPQNRSKMNIPFRIGNAKGDDALEKRFLDKALELNMLSLKGHRSVGGIRASLYNAVTIEDVQKLAAFMKKFLEMHQL

SEQ ID NO: 971 - protein, 370 aa, synthetic construct
MDAPRQVVNFGPGPAKLPHSVLLEIQKELLDYKGVGISVLEMSHRSSDFAKIINNTENLVRELLAVPDNYKVIFLQGGGCGQFSAVPLNLIGLKAGRCADYVVTGAWSAKAAEEAKKFGTINIVHPKLGSYTKIPDPSTWNLNPDASYVYYCANETVHGVEFDFIPDVKGAVLVCDVSSNFLSKPVDVSKFGVIFAGAQKNVGSAGVTVVIVRDDLLGFALRECPSVLEYKVQAGNSSLYNTPPCFSIYVMGLVLEWIKNNGGAAAMEKLSSIKSQTIYEIIDNSQGFYVCPVEPQNRSKMNIPFRIGNAKGDDALEKRFLDKALELNMLSLKGHRSVGGIRASLYNAVTIEDVQKLAAFMKKFLEMHQL

SEQ ID NO: 972 - protein, 370 aa, synthetic construct
MDAPRQVVNFGPGPAKLPHSVLLEIQKELLDYKGVGISVLEMSHRSSDFAKIINNTENLVRELLAVPDNYKVIFLQGGGCGQFSAVPLNLIGLKAGRCADYVVTGAWSAKAAEEAKKFGTINIVHPKFGSYTKIPDPSTWNLNPDASYVYYCANETVHGVEFDFIPDVKGAVLVCDMSSNFLSKPVDVSKFGVIFAGAQKNVGSAGVTVVIVRDDLLGFALRECPSVLEYKVQAGNSSLYNTPPCFSIYVMGLVLEWIKNNGGAAAMEKLSSIKSQTIYEIIDNSQGFYVCPVEPQNRSKMNIPFRIGNAKGDDALEKRFLDKALELNMLSLKGHRSVGGIRASLYNAVTIEDVQKLAAFMKKFLEMHQL

SEQ ID NO: 973 - protein, 370 aa, synthetic construct
MDAPRQVVNFGPGPAKLPHSVLLEIQKELLDYKGVGISVLEMSHRSSDFAKIINNTENLVRELLAVPDNYKVIFLQGGGCGQFSAVPLNLICLKAGRCADYVVTGAWSAKAAEEAKKFGTINIVHPKLGSYTKIPDPSTWNLNPDASYVYYCANETVHGVEFDFIPDVKGAVLVCDMSSNFLSKPVDVSKFGVIFAGAQKNVGSAGVTVVIVRDDLLGFALRECPSVLEYKVQAGNSSLYNTPPCFSIYVMGLVLEWIKNNGGAAAMEKLSSIKSQTIYEIIDNSQGFYVCPVEPQNRSKMNIPFRIGNAKGDDALEKRFLDKALELNMLSLKGHRSVGGIRASLYNAVTIEDVQKLAAFMKKFLEMHQL

SEQ ID NO: 974 - protein, 370 aa, synthetic construct
MDAPRQVVNFGPGPAKLPHSVLLEIQKELLDYKGVGISVLEMSHRSSDFAKIINNTENLVRELLAVPDNYKVIFLQGGGCGQFSAVPLNLIGLKAGRCADYVVTGAWSAKAAEEAKKFGTINIVHPKLGSYTKIPDPSTWNLNPDASYVYYCANETVHGLEFDFIPDVKGAVLVCDMSSNFLSKPVDVSKFGVIFAGAQKNVGSAGVTVVIVRDDLLGFALRECPSVLEYKVQAGNSSLYNTPPCFSIYVMGLVLEWIKNNGGAAAMEKLSSIKSQTIYEIIDNSQGFYVCPVEPQNRSKMNIPFRIGNAKGDDALEKRFLDKALELNMLSLKGHRSVGGIRASLYNAVTIEDVQKLAAFMKKFLEMHQL

SEQ ID NO: 975 - protein, 370 aa, synthetic construct
MDAPRQVVNFGPGPAKLPHSVLLEIQKELLDYKGVGISVLEMSHRSSDFAKIINNTENLVRELLAVPDNYKVIFLQGGGCGQFSAVPLNLIGLKAGRCADYVVTGAWSAKAAEEAKKFGTINIVHPKLGSYTKIPDPSTWNLNPDASYVYYCANETVHGVEFDFIPDVKGAVLVCDMSSNFLSKPVDVSKFGVIFAGGQKNVGSAGVTVVIVRDDLLGFALRECPSVLEYKVQAGNSSLYNTPPCFSIYVMGLVLEWIKNNGGAAAMEKLSSIKSQTIYEIIDNSQGFYVCPVEPQNRSKMNIPFRIGNAKGDDALEKRFLDKALELNMLSLKGHRSVGGIRASLYNAVTIEDVQKLAAFMKKFLEMHQL

SEQ ID NO: 976 - protein, 370 aa, synthetic construct
MDAPRQVVNFGPGPAKLPHSVLLEIQKDLLDYKGVGISVLEMSHRSSDFAKIINNTENLVRELLAVPDNYKVIFLQGGGCGQFSAVPLNLIGLKAGRCADYVVTGAWSAKAAEEAKKFGTINIVHPKLGSYTKIPDPSTWNLNPDASYVYYCANETVHGVEFDFIPDVKGAVLVCDMSSNFLSKPVDVSKFGVIFAGAQKNVGSAGVTVVIVRDDLLGFALRECPSVLEYKVQAGNSSLYNTPPCFSIYVMGLVLEWIKNNGGAAAMEKLSSIKSQTIYEIIDNSQGFYVCPVEPQNRSKMNIPFRIGNAKGDDALEKRFLDKALELNMLSLKGHRSVGGIRASLYNAVTIEDVQKLAAFMKKFLEMHQL

SEQ ID NO: 977 - protein, 370 aa, synthetic construct
MDAPRQVVNFGPGPAKLPHSVLLEIQKELLDYKGVGISVLEMSHRSSDFAKIINNTENLVRELLAVPDNYKVIFLQGGGCGQFSAVTLNLIGLKAGRCADYVVTGAWSAKAAEEAKKFGTINIVHPKLGSYTKIPDPSTWNLNPDASYVYYCANETVHGVEFDFIPDVKGAVLVCDMSSNFLSKPVDVSKFGVIFAGAQKNVGSAGVTVVIVRDDLLGFALRECPSVLEYKVQAGNSSLYNTPPCFSIYVMGLVLEWIKNNGGAAAMEKLSSIKSQTIYEIIDNSQGFYVCPVEPQNRSKMNIPFRIGNAKGDDALEKRFLDKALELNMLSLKGHRSVGGIRASLYNAVTIEDVQKLAAFMKKFLEMHQL

SEQ ID NO: 978 - protein, 370 aa, synthetic construct
MDAPRQVVNFGPGPAKLPHSVLLEIQKELLDYKGVGISVLEMSHRSSDFAKIINNTENLVRELLAVPDNYKVIFLQGGGCGQFSAVPLNLIGLKAGRCADYVVTGAWSAKAAEEAKKFGTINIVHPKLGSYTKIPDPSTWNLNPDACYVYYCANETVHGVEFDFIPDVKGAVLVCDMSSNFLSKPVDVSKFGVIFAGAQKNVGSAGVTVVIVRDDLLGFALRECPSVLEYKVQAGNSSLYNTPPCFSIYVMGLVLEWIKNNGGAAAMEKLSSIKSQTIYEIIDNSQGFYVCPVEPQNRSKMNIPFRIGNAKGDDALEKRFLDKALELNMLSLKGHRSVGGIRASLYNAVTIEDVQKLAAFMKKFLEMHQL

SEQ ID NO: 979 - protein, 370 aa, synthetic construct
MDAPRQVVNFGPGPAKLPHSVLLEIQKELLDYKGVGISVLEMSHRSSDFAKIINNTENLVRELLAVPDNYKVIFLQGGGCGQFSAVPLNLIGLKAGRCADYVVTGAWSAKAAEEAKKFGTINIVHPKLGSYTKIPDPSTWNLNPDASYVYYCANETVHGVEFDFIPDVKGAVLVCDMSSNFLSKPVDVSKFGVIFAGAQKNVGSAGVTVVIVRDDLLGFALRECPSVLEYKVQAGNSSLYNTPPCFSIYVMGLVLEWIKNNGGAAAMAKLSSIKSQTIYEIIDNSQGFYVCPVEPQNRSKMNIPFRIGNAKGDDALEKRFLDKALELNMLSLKGHRSVGGIRASLYNAVTIEDVQKLAAFMKKFLEMHQL

SEQ ID NO: 980 - protein, 370 aa, synthetic construct
MDAPMQVVNFGPGPAKLPHSVLLEIQKELLDYKGVGISVLEMSHRSSDFAKIINNTENLVRELLAVPDNYKVIFLQGGGCGQFSAVPLNLIGLKAGRCADYVVTGAWSAKAAEEAKKFGTINIVHPKLGSYTKIPDPSTWNLNPDASYVYYCANETVHGVEFDFIPDVKGAVLVCDMSSNFLSKPVDVSKFGVIFAGAQKNVGSAGVTVVIVRDDLLGFALRECPSVLEYKVQAGNSSLYNTPPCFSIYVMGLVLEWIKNNGGAAAMEKLSSIKSQTIYEIIDNSQGFYVCPVEPQNRSKMNIPFRIGNAKGDDALEKRFLDKALELNMLSLKGHRSVGGIRASLYNAVTIEDVQKLAAFMKKFLEMHQL

SEQ ID NO: 981 - protein, 370 aa, synthetic construct
MDAPRQVVNFGPGPAKLPHSVLLEIQKELLDYKGVGISVLEMSHRSSDFAKIINNTENLVRELLAVPDNYKVIFLQGGGCGQFSAVPLNLIGLKAGRCADYVVTGAWSAKAAEEAKKFGTINIVHPKLGSYTKIPDPSTWNLNPDASYVYYCANETVHGVEFDFIPDVKGAVLVCDMSSNFLSKPVDVSKFGVIFAGAQKNVGSAGVTVVIVRDDLLGFALRECPSVLEYKVQAGNSSLYNTPPCFSIYVMGLVLEWIKNNGGAAAMEKLSSIKSQTIYEIIDNSQGFYACPVEPQNRSKMNIPFRIGNAKGDDALEKRFLDKALELNMLSLKGHRSVGGIRASLYNAVTIEDVQKLAAFMKKFLEMHQL

SEQ ID NO: 982 - protein, 370 aa, synthetic construct
MDAPRQVVNFGPGPAKLPHSVLLEIQKELLDYKGVGISVLEMSHRSSDFAKIINNTENLVRELLAVPDNYKVIFLQGGGCGQFSTVPLNLIGLKAGRCADYVVTGAWSAKAAEEAKKFGTINIVHPKLGSYTKIPDPSTWNLNPDASYVYYCANETVHGVEFDFIPDVKGAVLVCDMSSNFLSKPVDVSKFGVIFAGAQKNVGSAGVTVVIVRDDLLGFALRECPSVLEYKVQAGNSSLYNTPPCFSIYVMGLVLEWIKNNGGAAAMEKLSSIKSQTIYEIIDNSQGFYVCPVEPQNRSKMNIPFRIGNAKGDDALEKRFLDKALELNMLSLKGHRSVGGIRASLYNAVTIEDVQKLAAFMKKFLEMHQL

SEQ ID NO: 983 - protein, 370 aa, synthetic construct
MDAPRQVVNFGPGPAKLPHSVLLEIQKELLDYKGVGISVLEMSHRSSDFAKIINNTENLVRELLAVPDNYKVIFLQGGGCGQFSAVPLNLIGLKAGRCADYVVTGAWSAKAAEEAKKFGTINIVHPKLGSYTKIPDPSTWNLNPDASYVYYCANETVHGVEFDFIPDVKGAVLVCDMSSNFLSKPVDVSKFGVIFAGAQKNVGSAGVTVVIVRDDLLGFALRECTSVLEYKVQAGNSSLYNTPPCFSIYVMGLVLEWIKNNGGAAAMEKLSSIKSQTIYEIIDNSQGFYVCPVEPQNRSKMNIPFRIGNAKGDDALEKRFLDKALELNMLSLKGHRSVGGIRASLYNAVTIEDVQKLAAFMKKFLEMHQL

SEQ ID NO: 984 - protein, 370 aa, synthetic construct
MDAPRQVVNFGPGPAKLPHSVLLEIQKELLDYKGVGISVLEMSHRSSDFAKIINNTENLVRELLAVPDNYKVIFLQGGGCGQFSAVPLNLIGLKAGRCADYVVTGAWSAKAAEEAKKFGTINIVHPKLGSYTKIPDPSTWNLNPDASYVYYCANETVHGVEFDFIPDVKGAVLVCDMSSNFLSKPVDVSKFGVIFAGAQKNVGSAGVTVVIVRDDLLGFALRECPSVLEYKVQAGNSSLYNTPPCFGIYVMGLVLEWIKNNGGAAAMEKLSSIKSQTIYEIIDNSQGFYVCPVEPQNRSKMNIPFRIGNAKGDDALEKRFLDKALELNMLSLKGHRSVGGIRASLYNAVTIEDVQKLAAFMKKFLEMHQL

SEQ ID NO: 985 - protein, 370 aa, synthetic construct
MDAPRQVVNFGPGPAKLPHSVLLEIQKELLDYKGVGISVLEMSHRSSDFAKIINNTENLVRELLAVPDNYKVIFLQGGGCGQFSAVPLNLIGLKAGRCADYVVTGAWSAKAAEEAKKFGTINIVHPKLGSYTKIPDPSTWNLNPDASYVYYCANETVHGVEFDFIPDVKGAVLVCDMSSNFLSKPVDVSKFGVIFAGAQKNVGSAGVTVVIVRDDLLGFALRECPSVLEYKVQAGNSSLYNTPPCFSIYVMGLVLEWIKNNGGAAAMEKLSSIKSQTIYEIIDNSQGFYVCPVEPQNRSKMNIPFRIGNAKGDDALEKGFLDKALELNMLSLKGHRSVGGIRASLYNAVTIEDVQKLAAFMKKFLEMHQL

SEQ ID NO: 986 - protein, 370 aa, synthetic construct
MDAPRQVVNFGPGPAKLPRSVLLEIQKELLDYKGVGISVLEMSHRSSDFAKIINNTENLVRELLAVPDNYKVIFLQGGGCGQFSAVPLNLIGLKAGRCADYVVTGAWSAKAAEEAKKFGTINIVHPKLGSYTKIPDPSTWNLNPDASYVYYCANETVHGVEFDFIPDVKGAVLVCDMSSNFLSKPVDVSKFGVIFAGAQKNVGSAGVTVVIVRDDLLGFALRECPSVLEYKVQAGNSSLYNTPPCFSIYVMGLVLEWIKNNGGAAAMEKLSSIKSQTIYEIIDNSQGFYVCPVEPQNRSKMNIPFRIGNAKGDDALEKRFLDKALELNMLSLKGHRSVGGIRASLYNAVTIEDVQKLAAFMKKFLEMHQL

SEQ ID NO: 987 - protein, 370 aa, synthetic construct
MDAPRQVVNFGPGPAKLPHSVLLEIQKELLDYKGVGISVLEMSHRSSDFAKIINNTENLVRELLAVPDNYKVIFLQGGGCGQFSAVPLNLIGLKAGRCADYVVTGAWSAKAAEEAKKFGTINIVHPKLGSYTKIPDPSTWNLNPDASYVYYCANETVHGVEFDFIPDVKGAVLVCDMSSNFLSKPVDVSKFGVIFAGAQKNVGSAGVTVVIVRDDLLGFALRECPSVLEYKVQAGNSSLYNTPPCFSIYVMGLVLEWIKNNGGAAAMEKLSSIKSQTIYEIIDNSQGFYVCPVEPQNRSKMNIPFRIGNAKGDDALEKRFLDKALELNMLSLKGHRSVGGIRASLYNAVTIEDVQKLAAFMKKFWEMHQL

SEQ ID NO: 988 - protein, 370 aa, synthetic construct
MDAPRQVVNFGPGPAKLPHSVLLEIQKELLDYKGVGISVLEMSHRSSDFAKIINNTENLVRELLAVPDNYKVIFLQGGGCGQFSAVPLNLIGLKAGRCADYVVTGAWSAKAAEEAKKFGTINIVHPKLGSYTKIPDPSTWNLNPDASYVYYCANETVHGVEFDFIPDVKGAVLVCDMSSNFLSKPVDVSKFGVIFAGAQKNVGSAGVTVVIVRDDLLGFALRECPSVLEYKVQAGNSSLYNTPPCFSIYVMGLVLEWIKNNGGAAAMEKLSSIKSQTIYEIIDNSQGFYVCPVEPQNRSKMNIPFRVGNAKGDDALEKRFLDKALELNMLSLKGHRSVGGIRASLYNAVTIEDVQKLAAFMKKFLEMHQL

SEQ ID NO: 989 - protein, 370 aa, synthetic construct
MDAPRQVVNFGPGPAKLPHSVLLEIQKELLDYKGVGISVLEMSHRSSDFAKIINNTENLVRELLAVPDNYKVIFLQGGGCGQFSAVPLNLIGLKAGRCADYVVTGAWSAKAAEEAKKFGTINIVHPKLGSYTKIPDPSTWNVNPDASYVYYCANETVHGVEFDFIPDVKGAVLVCDMSSNFLSKPVDVSKFGVIFAGAQKNVGSAGVTVVIVRDDLLGFALRECPSVLEYKVQAGNSSLYNTPPCFSIYVMGLVLEWIKNNGGAAAMEKLSSIKSQTIYEIIDNSQGFYVCPVEPQNRSKMNIPFRIGNAKGDDALEKRFLDKALELNMLSLKGHRSVGGIRASLYNAVTIEDVQKLAAFMKKFLEMHQL

SEQ ID NO: 990 - protein, 370 aa, synthetic construct
MDAPRQVVNFGPGPAKLPHSVLLEIQKELLDYKGVGISVLEMSHRSSDFAKIINNTENLVRELLAVPDNYKVIFLQGGGCGQFSAVPLNLIGLKAGRCADYVVTGAWSAKAAEEAKKFGTINIVHPKLGSYTKIPDPSTWNLNPDASYVYYCANETVHGVEFDFIPDVKGAVLVCDMSSNFLSKPVDVSKFGVIFAGAQKNVGSAGVTVVIVRDDLLGFALRKCPSVLEYKVQAGNSSLYNTPPCFSIYVMGLVLEWIKNNGGAAAMEKLSSIKSQTIYEIIDNSQGFYVCPVEPQNRSKMNIPFRIGNAKGDDALEKRFLDKALELNMLSLKGHRSVGGIRASLYNAVTIEDVQKLAAFMKKFLEMHQL

SEQ ID NO: 991 - protein, 370 aa, synthetic construct
MDAPRQVVNFGPGPAKLPHSVLLEIQKELLDYKGVGISVLEMSHRSSDFAKIINNTENLVRELLAVPDNYKVIFLQGGGCGQFSAVPLNLIGLKAGRCADYVVTGAWSAKAAEEAKKFGTINIVHPKRGSYTKIPDPSTWNLNPDASYVYYCANETVHGVEFDFIPDVKGAVLVCDMSSNFLSKPVDVSKFGVIFAGAQKNVGSAGVTVVIVRDDLLGFALRECPSVLEYKVQAGNSSLYNTPPCFSIYVMGLVLEWIKNNGGAAAMEKLSSIKSQTIYEIIDNSQGFYVCPVEPQNRSKMNIPFRIGNAKGDDALEKRFLDKALELNMLSLKGHRSVGGIRASLYNAVTIEDVQKLAAFMKKFLEMHQL

SEQ ID NO: 992 - protein, 370 aa, synthetic construct
MDAPRQVVNFGPGPAKLPHSVLLEIQKELLDYKGVGISVLEMSHRSSDFAKIINNTENLVRELLAVPDNYKVIFLQGGGCGQFSAVPLNLIGLKAGRCADYVVTGAWSAKAAEEAKKFGTINIVHPKLGSYTKIPDPSTWNLNPDASYVYYCANETVHGVEFDFIPDVKGAVLVCDMSSNFLAKPVDVSKFGVIFAGAQKNVGSAGVTVVIVRDDLLGFALRECPSVLEYKVQAGNSSLYNTPPCFSIYVMGLVLEWIKNNGGAAAMEKLSSIKSQTIYEIIDNSQGFYVCPVEPQNRSKMNIPFRIGNAKGDDALEKRFLDKALELNMLSLKGHRSVGGIRASLYNAVTIEDVQKLAAFMKKFLEMHQL

SEQ ID NO: 993 - protein, 370 aa, synthetic construct
MDAPRQVVNFGPGPAKLPHSVLLEIQKELLDYKGVGISVLEMSHRSSDFAKIINNTENLVRELLAVPDNYKVIFLQGGGCGQFSAVPLNLIGLKAGRCADYVVTGAWSAKAAEEAKKFGTINIVHPKLGSYIKIPDPSTWNLNPDASYVYYCANETVHGVEFDFIPDVKGAVLVCDMSSNFLSKPVDVSKFGVIFAGAQKNVGSAGVTVVIVRDDLLGFALRECPSVLEYKVQAGNSSLYNTPPCFSIYVMGLVLEWIKNNGGAAAMEKLSSIKSQTIYEIIDNSQGFYVCPVEPQNRSKMNIPFRIGNAKGDDALEKRFLDKALELNMLSLKGHRSVGGIRASLYNAVTIEDVQKLAAFMKKFLEMHQL

SEQ ID NO: 994 - protein, 370 aa, synthetic construct
MDAPRQVVNFGPGPAKLPHSVLLEIQKELLDYKGVGISVLEMSHRSSDFAKIINNTENLVRELLAVPDNYKVIFLQGGGCGQFSAVPLNLIGLKAGRCADYVVTGAWSAKAAEEAKKFGTINIVHPKLGSYTKIPDPSTWNLNPDASYVYYCANETVHGVEFDFIPDVKGAVLVCDMSSNFLSKPVDVSKFGVIFAGAQKNVGSAGVTVVIVRDDLLGFALRECPSVLEYKVQAGNSSLYNTPPCFSIYVMGLVLERIKNNGGAAAMEKLSSIKSQTIYEIIDNSQGFYVCPVEPQNRSKMNIPFRIGNAKGDDALEKRFLDKALELNMLSLKGHRSVGGIRASLYNAVTIEDVQKLAAFMKKFLEMHQL

SEQ ID NO: 995 - protein, 370 aa, synthetic construct
MDAPRQVVNFGPGPAKLPHSVLLEIQKELLDYKGVGISVLEMSHRSSDFAKIINNTENLVRELLAVPDNYKVIFLQGGGCGQFSAVPLNLIGLKAGRCADYVVTGAWSAKAAEEAKKFGTINIVHPKLGSYTKIPDPSTWNLNPDASYVYYCANETVHGVEFDFIPDVKGAVLVCDMSSNFLSKPVDVSKFGVIFAGAQKNVGSAGVTVVIVRDDLLGFALRECPSVLEYKVQAGNSSLYNTPPCFSIYVMGLVLEWIKNNGGAAAMEKLSSIKSQTIYEIIDNSQGFYVCPVEPQNRSKMNIPFRIGNAKRDDALEKRFLDKALELNMLSLKGHRSVGGIRASLYNAVTIEDVQKLAAFMKKFLEMHQL

SEQ ID NO: 996 - protein, 370 aa, synthetic construct
MDAPRQVVNFGPGPAKLPHSVLLEIQKELLDYKGVGISVLEMSHRSSDFAKIINNTENLVRELLAVPDNYKVIFLQGGGCGQFSAVPLNLIGLKAGRCADYVVTGAWSAKAAEEAKKFGTINIVHPKLGSYTKIADPSTWNLNPDASYVYYCANETVHGVEFDFIPDVKGAVLVCDMSSNFLSKPVDVSKFGVIFAGAQKNVGSAGVTVVIVRDDLLGFALRECPSVLEYKVQAGNSSLYNTPPCFSIYVMGLVLEWIKNNGGAAAMEKLSSIKSQTIYEIIDNSQGFYVCPVEPQNRSKMNIPFRIGNAKGDDALEKRFLDKALELNMLSLKGHRSVGGIRASLYNAVTIEDVQKLAAFMKKFLEMHQL

SEQ ID NO: 997 - protein, 370 aa, synthetic construct
MDAPRQVVNFGPGPAKLPHSVLLEIQKELLDYKGVGISVLEMSHRSSDFAKIINNTENLVRELLAVPDNYKVIFLQGGGCGQFSAVPLNLIGLKAGRCADYVVTGAWSAKAAEEAKKFGTINIVHPKLGSYTKIPDPSTWNLNPDASYVYYCANETVHGVEFDFIPDVKGAVLVCDMSSNFLSKPVDVSKFGVIFAGAQKNVGSAGVTVVIVRDDLLGFALRECPSVLEYKVQAGNSSLYNTPPCFSIYVMGLVLEWIKNNGGAAAMEKLSSIKSQTIYEIIDNSQGFYVCPVEPQNRSKMNIPFRIGNAKGADALEKRFLDKALELNMLSLKGHRSVGGIRASLYNAVTIEDVQKLAAFMKKFLEMHQL

SEQ ID NO: 998 - protein, 370 aa, synthetic construct
MDAPRQVVNFGPGPAKLPHSVLLEIQKELLDYKGVGISVLEMSHRSSDFAKIINNTENLVRELLAVPDNYKVIFLQGGGCGQFSAVPLNLIGLKAGRCADYVVTGAWSAKAAEEAKKFGTINIVHPKLGSYTKIPDPSTWNLNPDASYVYYCANETVHGVEFDFIPDVKGAVLVCDMSSNFLSKPVDVSKFGVIFAGAQKNVGSAGVTVVIVRDDLLGFALRECPSVLEYKVQAGNSSLYNTPPCFSIYVMGLVLEWIKNNGGAAAMEKLSSIKSKTIYEIIDNSQGFYVCPVEPQNRSKMNIPFRIGNAKGDDALEKRFLDKALELNMLSLKGHRSVGGIRASLYNAVTIEDVQKLAAFMKKFLEMHQL

SEQ ID NO: 999 - protein, 370 aa, synthetic construct
MDAPRQVVNFGPGPAKLPHSVLLEIQKELLDYKGVGISVLEMSHRSSDFAKIINNTENLVRELLAVPDNYKVIFLQGGGCGQFSAVALNLIGLKAGRCADYVVTGAWSAKAAEEAKKFGTINIVHPKLGSYTKIPDPSTWNLNPDASYVYYCANETVHGVEFDFIPDVKGAVLVCDMSSNFLSKPVDVSKFGVIFAGAQKNVGSAGVTVVIVRDDLLGFALRECPSVLEYKVQAGNSSLYNTPPCFSIYVMGLVLEWIKNNGGAAAMEKLSSIKSQTIYEIIDNSQGFYVCPVEPQNRSKMNIPFRIGNAKGDDALEKRFLDKALELNMLSLKGHRSVGGIRASLYNAVTIEDVQKLAAFMKKFLEMHQL

SEQ ID NO: 1000 - protein, 370 aa, synthetic construct
MDAPRQVVNFGPGPAKLPHSVLLEIQKELLDYKGVGISVLEMSHRSSDFAKIINNTENLVRELLAVPDNYKVIFLQGGGCGQFSAVPLNLIGLKAGRCADYVVTGAWSAKAAEEAKKFGTINIVHPKLGSYTKIPDPSTWNLNPDASYVYYCANETVHGVEFDFIPDVKGAVLVCDMSSNFLSKPVDVSKFGVIFAGAQKNVGAAGVTVVIVRDDLLGFALRECPSVLEYKVQAGNSSLYNTPPCFSIYVMGLVLEWIKNNGGAAAMEKLSSIKSQTIYEIIDNSQGFYVCPVEPQNRSKMNIPFRIGNAKGDDALEKRFLDKALELNMLSLKGHRSVGGIRASLYNAVTIEDVQKLAAFMKKFLEMHQL

SEQ ID NO: 1001 - protein, 370 aa, synthetic construct
MDAPRQVVNFGPGPAKLPHSVLLEIQKELLDYKGVGICVLEMSHRSSDFAKIINNTENLVRELLAVPDNYKVIFLQGGGCGQFSAVPLNLIGLKAGRCADYVVTGAWSAKAAEEAKKFGTINIVHPKLGSYTKIPDPSTWNLNPDASYVYYCANETVHGVEFDFIPDVKGAVLVCDMSSNFLSKPVDVSKFGVIFAGAQKNVGSAGVTVVIVRDDLLGFALRECPSVLEYKVQAGNSSLYNTPPCFSIYVMGLVLEWIKNNGGAAAMEKLSSIKSQTIYEIIDNSQGFYVCPVEPQNRSKMNIPFRIGNAKGDDALEKRFLDKALELNMLSLKGHRSVGGIRASLYNAVTIEDVQKLAAFMKKFLEMHQL

SEQ ID NO: 1002 - protein, 370 aa, synthetic construct
MDAPRQVVNFGPGPAKLPHSVLLEIQKELLDYKGVGISVLEMSHRSSDFAKIINNTENLVRELLAVPDNYKVIFLQGGGCGQFSAVPLNLIGLKAGRCADYVVTGAWSAKAAEEAKKFGTINIVHPKLGSYTKIPDPSTWNLNPDASYVYYCANETVHGVEFDFIPDVKGAVLVCDMSSNFLSKPVDVSKFGVIFAGAQKNVGSAGVTVVIVRDDLLGFALRECPSVLEYKVQAGNSSLYNTPPCFSIYVMGLVLEWIKNNGGAAAMEKLSSIKSQTIYEIIDNSQGFYVCPVEPQNRSKMNIPFRIGNAKGDDALEKRFLDKALELNMLSLKGHRSVGGIRASLYNAVTIEDVQKLAAFMRKFLEMHQL

SEQ ID NO: 1003 - protein, 370 aa, synthetic construct
MDAPRQVVNFGPGPAKLPHSVLLEIQKELLDYKGVGISVLEMSHRSSDFAKIINNTENLVRELLAVPDNYKVIFLQGGGCGQFSAVPLNLIGLKAGRCADYVVTGAWSAKAAEEAKKFGTINIVHPKLGSYTKIPDPSTWNLNPDASYVYYCANETVHGVEFDFIPDVKGAVLVCDMSSNFLSKPVDVSKFGVIFAGAQKNVGSAGLTVVIVRDDLLGFALRECPSVLEYKVQAGNSSLYNTPPCFSIYVMGLVLEWIKNNGGAAAMEKLSSIKSQTIYEIIDNSQGFYVCPVEPQNRSKMNIPFRIGNAKGDDALEKRFLDKALELNMLSLKGHRSVGGIRASLYNAVTIEDVQKLAAFMKKFLEMHQL

SEQ ID NO: 1004 - protein, 370 aa, synthetic construct
MDAPRQVVNFGPGPAKLPHSVLLEIQKELLDYKGVGISVLEMSHRSSDFAKIINNTENLVRELLAVPDNYKVIFLQGGGCGQFSAVPLNLIGLKAGRCADYVVTGAWSAKAAEEAKKFGTINIVHPKLGSYTKIPDPSTWNLNPDASYVYYCANETVHGVEFDFIPDVKGAVLVCDMSSNFLSKPVDVSKFGVIFAGAQKNVGSAGVTVVIVRDDLLGFALRECPSVLEYKVQAGNSSLYNTPPCFSIYIMGLVLEWIKNNGGAAAMEKLSSIKSQTIYEIIDNSQGFYVCPVEPQNRSKMNIPFRIGNAKGDDALEKRFLDKALELNMLSLKGHRSVGGIRASLYNAVTIEDVQKLAAFMKKFLEMHQL

SEQ ID NO: 1005 - protein, 370 aa, synthetic construct
MDAPRQVVNFGPGPAKLPHSVLLEIQKELLDYKGVGISVLEMSHRSSDFAKIINNTENLVRELLAVPDNYKVIFLQGGGCGQFSAVPLNLIGLKAGRCADYVVTGAWSAKAAEEAKKFGTINIVHPKLGSYTKIPDPSTWNLNPDASYVYYCANETVHGVEFDFIPDVKGAVLVCDMSSNFLSKPVDVSKFGVIFAGAQKNVGSAGVTVVIVRDDLLGFALRECPSVLEYKVQAGNSSLYNTPPCFSIYVMGLVLEWIKNNGGAAAMEKLSSIKSQTIYEIIDNSQGFYVCPVEPQNRSKMNIPFRIGNAKGDDALEKRFLDKALELNMLYLKGHRSVGGIRASLYNAVTIEDVQKLAAFMKKFLEMHQL

SEQ ID NO: 1006 - protein, 370 aa, synthetic construct
MDAPRQVVNFGPGPAKLPHSVLLEIQKELLDYKGVGISVLEMSHRSSDFAKIINNTENLVRELLAVPDNYKVIFLQGGGCGQFSAVPLNLIGLKAGRCADYVVTGAWSAKAAEEAKKFGTINIVHPKLGSYTKIPDPSAWNLNPDASYVYYCANETVHGVEFDFIPDVKGAVLVCDMSSNFLSKPVDVSKFGVIFAGAQKNVGSAGVTVVIVRDDLLGFALRECPSVLEYKVQAGNSSLYNTPPCFSIYVMGLVLEWIKNNGGAAAMEKLSSIKSQTIYEIIDNSQGFYVCPVEPQNRSKMNIPFRIGNAKGDDALEKRFLDKALELNMLSLKGHRSVGGIRASLYNAVTIEDVQKLAAFMKKFLEMHQL

SEQ ID NO: 1007 - protein, 370 aa, synthetic construct
MDDPRQVVNFGPGPAKLPHSVLLEIQKELLDYKGVGISVLEMSHRSSDFAKIINNTENLVRELLAVPDNYKVIFLQGGGCGQFSAVPLNLIGLKAGRCADYVVTGAWSAKAAEEAKKFGTINIVHPKLGSYTKIPDPSTWNLNPDASYVYYCANETVHGVEFDFIPDVKGAVLVCDMSSNFLSKPVDVSKFGVIFAGAQKNVGSAGVTVVIVRDDLLGFALRECPSVLEYKVQAGNSSLYNTPPCFSIYVMGLVLEWIKNNGGAAAMEKLSSIKSQTIYEIIDNSQGFYVCPVEPQNRSKMNIPFRIGNAKGDDALEKRFLDKALELNMLSLKGHRSVGGIRASLYNAVTIEDVQKLAAFMKKFLEMHQL

SEQ ID NO: 1008 - protein, 370 aa, synthetic construct
MDAPRQVVNFGPGPAKLPHSVLLEIQKELLDYKGVGISVLEMSHRSSDFAKIINNTENLVRELLDVPDNYKVIFLQGGGCGQFSAVPLNLIGLKAGRCADYVVTGAWSAKAAEEAKKFGTINIVHPKLGSYTKIPDPSTWNLNPDASYVYYCANETVHGVEFDFIPDVKGAVLVCDMSSNFLSKPVDVSKFGVIFAGAQKNVGSAGVTVVIVRDDLLGFALRECPSVLEYKVQAGNSSLYNTPPCFSIYVMGLVLEWIKNNGGAAAMEKLSSIKSQTIYEIIDNSQGFYVCPVEPQNRSKMNIPFRIGNAKGDDALEKRFLDKALELNMLSLKGHRSVGGIRASLYNAVTIEDVQKLAAFMKKFLEMHQL

SEQ ID NO: 1009 - protein, 370 aa, synthetic construct
MDAPRQVVNFGPGPAKLPHSVLLEIQKELLDYKGVGISVLEMSHRSSDFAKIINNTENLVRELLAVPDNYKVIFLQGGGCGQFSAVPLNLIGLKAGRCADYVVTGAWSAKAAEEAKKFGTINIVHPKLGSYTKIPDPSTWNLNPDASYVYYCANETVHGVEFDFIPDVKGAVLVCDMSSNFLSKPVDVSKFGVIFAGAQKNVGSAGVTVVIVRDDLLGFALRECPSVLEYKVQAGNSSLYNTPPCFSIYVMGLVLEWIKNNGGAAAMEKLSSIKSQTIYEIIDNSQGFYVCPVGPQNRSKMNIPFRIGNAKGDDALEKRFLDKALELNMLSLKGHRSVGGIRASLYNAVTIEDVQKLAAFMKKFLEMHQL

SEQ ID NO: 1010 - protein, 370 aa, synthetic construct
MDAPRQVVNFGPGPAKLPHSVLLEIQKELLDYKGVGISVLEMSHRSSDFAKIINNTENLVRELLAVPDNYKVIFLQGGGCGQFSAVPLNLIGLKAGRCADYVVTGAWSAKAAEEAKKFGTINIVHPKLGSYTKIPDPSTWNLNPDASYVYYCANETVHGVEFDFIPDVKGAVLVCDMSSNFLSKPVDVSKFGVIFAGAQKNVGSAGVTVVIVRDDLLGFALRECPSVLEYKVQAGNSSLYNTPPCFSIYVMGLVLEWIKNNGGAAAMEKLSSIKSQTIYEIIDNSQGFYVCPVEPQNRSKMNIPFRIGNAKGDDALEKRFLDKALELNMLSLKGHRSVGGIRASLYNAVTIEDVQKLAAFMKKFLEMPQL

SEQ ID NO: 1011 - protein, 370 aa, synthetic construct
MDAPRQVVNFGPGPAKLPHSVLLEIQKELLDYKGVGISVLEMSHRSSDFAKIINNTENLVRELLAVPDNYKVIFLQGGGCGQFSAVPLNLIGLKAGRCADYVVTGAWSAKAAEEAKKFGTINIVHPKLGSYTKIPDPSTWNLNPDGSYVYYCANETVHGVEFDFIPDVKGAVLVCDMSSNFLSKPVDVSKFGVIFAGAQKNVGSAGVTVVIVRDDLLGFALRECPSVLEYKVQAGNSSLYNTPPCFSIYVMGLVLEWIKNNGGAAAMEKLSSIKSQTIYEIIDNSQGFYVCPVEPQNRSKMNIPFRIGNAKGDDALEKRFLDKALELNMLSLKGHRSVGGIRASLYNAVTIEDVQKLAAFMKKFLEMHQL

SEQ ID NO: 1012 - protein, 370 aa, synthetic construct
MDAPRQVVNFGPGPAKLPHSVLLEIQKELLDYKGVGISVLEMSHRSSDFAKIINNTENLVRELLAVPDNYKVIFLQGGGCGQFSAVPLNLIGLKAGRCADYVVTGAWSAKAAEEAKKFGTINIVHPKLGSYTKIPDPSTWNLNPDASYVYYCANETVHGVEFDFIPDVKGAVLVCDMSSNFLSKPVDVSKFGVIFAGAQKNVGSAGVTVVIVRDDLLGFALRECPSVLEYKVQAGNISLYNTPPCFSIYVMGLVLEWIKNNGGAAAMEKLSSIKSQTIYEIIDNSQGFYVCPVEPQNRSKMNIPFRIGNAKGDDALEKRFLDKALELNMLSLKGHRSVGGIRASLYNAVTIEDVQKLAAFMKKFLEMHQL

SEQ ID NO: 1013 - protein, 370 aa, synthetic construct
MDAPRQVVNFGPGPAKLPHSVLLEIQKELLDYKGVGISVLEMSHRSSDFAKIINNTENLVRELLAVPDNYKVIFLQGGGCGQFSAVPLNLIGLKAGRCADYVVTGAWSAKAAEEAKKFGTINIVHPKLGSYTKIPDPSIWNLNPDASYVYYCANETVHGVEFDFIPDVKGAVLVCDMSSNFLSKPVDVSKFGVIFAGAQKNVGSAGVTVVIVRDDLLGFALRECPSVLEYKVQAGNSSLYNTPPCFSIYVMGLVLEWIKNNGGAAAMEKLSSIKSQTIYEIIDNSQGFYVCPVEPQNRSKMNIPFRIGNAKGDDALEKRFLDKALELNMLSLKGHRSVGGIRASLYNAVTIEDVQKLAAFMKKFLEMHQL

SEQ ID NO: 1014 - protein, 370 aa, synthetic construct
MDAPRQVVNFGPGPAKLPHSVLLEIQKELLDYKGVGISVLEMSHRSSDFAKIINNTENLVRELLAVPDNYKVIFLQGGGCGQFSAVPLNLIGLKAGRCADYVVTGAWSAKAAEEAKKFGTINIVHPKLGSYTKIPDPSTWNLNPDASYVYYCANETVHGVEFDYIPDVKGAVLVCDMSSNFLSKPVDVSKFGVIFAGAQKNVGSAGVTVVIVRDDLLGFALRECPSVLEYKVQAGNSSLYNTPPCFSIYVMGLVLEWIKNNGGAAAMEKLSSIKSQTIYEIIDNSQGFYVCPVEPQNRSKMNIPFRIGNAKGDDALEKRFLDKALELNMLSLKGHRSVGGIRASLYNAVTIEDVQKLAAFMKKFLEMHQL

SEQ ID NO: 1015 - protein, 370 aa, synthetic construct
MDAPRQVVNFGPGPAKLPHSVLLEIQKELLDYKGVGISVLEMSHRSSDFAKIIYNTENLVRELLAVPDNYKVIFLQGGGCGQFSAVPLNLIGLKAGRCADYVVTGAWSAKAAEEAKKFGTINIVHPKLGSYTKIPDPSTWNLNPDASYVYYCANETVHGVEFDFIPDVKGAVLVCDMSSNFLSKPVDVSKFGVIFAGAQKNVGSAGVTVVIVRDDLLGFALRECPSVLEYKVQAGNSSLYNTPPCFSIYVMGLVLEWIKNNGGAAAMEKLSSIKSQTIYEIIDNSQGFYVCPVEPQNRSKMNIPFRIGNAKGDDALEKRFLDKALELNMLSLKGHRSVGGIRASLYNAVTIEDVQKLAAFMKKFLEMHQL

SEQ ID NO: 1016 - protein, 370 aa, synthetic construct
MDAPRQVVNFGPGPAKLPHSVLLEIQKELLDYKGVGISVLEMSHRSSDFAKIINNTENLVRELLAVPDNYKVIFLQGGGCGQFSAVPLNLIGLKAGRCADYVVTGAWSAKAAEEAKKFGTINIVHPKLGSYTKIPDPSTWNLNPDASYVYYCANETVHGVEFDFIPDVKGAVLVCDMSSNFLSNPVDVSKFGVIFAGAQKNVGSAGVTVVIVRDDLLGFALRECPSVLEYKVQAGNSSLYNTPPCFSIYVMGLVLEWIKNNGGAAAMEKLSSIKSQTIYEIIDNSQGFYVCPVEPQNRSKMNIPFRIGNAKGDDALEKRFLDKALELNMLSLKGHRSVGGIRASLYNAVTIEDVQKLAAFMKKFLEMHQL

SEQ ID NO: 1017 - protein, 370 aa, synthetic construct
MDAPRQVVNFGPGPAKLPHSVLLEIQKELLDYKGVGISVLEMSHRSSDFAKIINNTENLVGELLAVPDNYKVIFLQGGGCGQFSAVPLNLIGLKAGRCADYVVTGAWSAKAAEEAKKFGTINIVHPKLGSYTKIPDPSTWNLNPDASYVYYCANETVHGVEFDFIPDVKGAVLVCDMSSNFLSKPVDVSKFGVIFAGAQKNVGSAGVTVVIVRDDLLGFALRECPSVLEYKVQAGNSSLYNTPPCFSIYVMGLVLEWIKNNGGAAAMEKLSSIKSQTIYEIIDNSQGFYVCPVEPQNRSKMNIPFRIGNAKGDDALEKRFLDKALELNMLSLKGHRSVGGIRASLYNAVTIEDVQKLAAFMKKFLEMHQL

SEQ ID NO: 1018 - protein, 370 aa, synthetic construct
MDAPRQVVNFGPGPAKLPHSVLLEIQKELLDYKGVGISVLEMSHRSSDFAKIINNTENLVRELLAVPDNYKVIFLQGGGCGQFSAVPLNLIGLKAGRCADYMVTGAWSAKAAEEAKKFGTINIVHPKLGSYTKIPDPSTWNLNPDASYVYYCANETVHGVEFDFIPDVKGAVLVCDMSSNFLSKPVDVSKFGVIFAGAQKNVGSAGVTVVIVRDDLLGFALRECPSVLEYKVQAGNSSLYNTPPCFSIYVMGLVLEWIKNNGGAAAMEKLSSIKSQTIYEIIDNSQGFYVCPVEPQNRSKMNIPFRIGNAKGDDALEKRFLDKALELNMLSLKGHRSVGGIRASLYNAVTIEDVQKLAAFMKKFLEMHQL

SEQ ID NO: 1019 - protein, 370 aa, synthetic construct
MDAPRQVVNFGPGPAKLPHSVLLEIQKELLDYKGVGISVLEMSHRSSDFAKIINNTENLMRELLAVPDNYKVIFLQGGGCGQFSAVPLNLIGLKAGRCADYVVTGAWSAKAAEEAKKFGTINIVHPKLGSYTKIPDPSTWNLNPDASYVYYCANETVHGVEFDFIPDVKGAVLVCDMSSNFLSKPVDVSKFGVIFAGAQKNVGSAGVTVVIVRDDLLGFALRECPSVLEYKVQAGNSSLYNTPPCFSIYVMGLVLEWIKNNGGAAAMEKLSSIKSQTIYEIIDNSQGFYVCPVEPQNRSKMNIPFRIGNAKGDDALEKRFLDKALELNMLSLKGHRSVGGIRASLYNAVTIEDVQKLAAFMKKFLEMHQL

SEQ ID NO: 1020 - protein, 370 aa, synthetic construct
MDAPRQVVNFGPGPAKLPHSVLLEIQKELLDYKGVGISVLEMSHRSSDFAKIINNTENLVRELLAVPDNYKVIFLQGGGCGQFSAVPLNLIGLKAGRCADYVVTGAWSAKAAEEAKKFGTINIVHPKLGSYTKIPDPSTWNLNPDASYVYYCANETVHGVEFDFIPDVKGAVLVCDMSSNFLSKPVDVSKFGVIFAGAQKNVGSAGVTVVIVRDDLLGFALRECPSVLEYKVQAGNSSLYNTPPCFSIYVMGLVLEWIKNNGGAAAMEKLSSIKSQTIYEIIDNSQGFYVCPVEPQNRSKMNIPFRLGNAKGDDALEKRFLDKALELNMLSLKGHRSVGGIRASLYNAVTIEDVQKLAAFMKKFLEMHQL

SEQ ID NO: 1021 - protein, 370 aa, synthetic construct
MDAPRQVVNFGPGPAKLPHSVLLEIQKELLDYKGVGISVLEMSHRSSDFAKNINNTENLVRELLAVPDNYKVIFLQGGGCGQFSAVPLNLIGLKAGRCADYVVTGAWSAKAAEEAKKFGTINIVHPKLGSYTKIPDPSTWNLNPDASYVYYCANETVHGVEFDFIPDVKGAVLVCDMSSNFLSKPVDVSKFGVIFAGAQKNVGSAGVTVVIVRDDLLGFALRECPSVLEYKVQAGNSSLYNTPPCFSIYVMGLVLEWIKNNGGAAAMEKLSSIKSQTIYEIIDNSQGFYVCPVEPQNRSKMNIPFRIGNAKGDDALEKRFLDKALELNMLSLKGHRSVGGIRASLYNAVTIEDVQKLAAFMKKFLEMHQL

SEQ ID NO: 1022 - protein, 370 aa, synthetic construct
MDAPRQVVNFGPGPAKLPHSVLLEIQKELLDYKGVGISVLEMSHRSSDFAKIINNTENLVRELLAVPDNYKVIFLQGGGCGQFSAVPLNLIGLKAGRCADYVVTGAWSAKAAEEAKKFGTINIVHPKLGSYTKIPDPSTWNLNPDASYVYYCANETVHGVEFDFIPDVKGAVLVCDMSSNFLSKPVDVSKFGVIFAGAQKNVGSAGVTVVIVRDDLLGFALRECPSVLEYKVQAGNSSLYNTPPCFSIYVMGLVLEWIKNNGGAAAMEKLSSIKSQTIYEIIDNSQGFYVCPVEPQNRSKMNIPFRIGNAKGDDALEKRFLDKALELNMLSLKGHRSVGGIRASLYNAVTIEDVQKLAAFMKRFLEMHQL

SEQ ID NO: 1023 - protein, 370 aa, synthetic construct
MDAPRQVVNFGPGPAKLPHSVLLEIQKELLDYKGVGISVLEMSHRSSDFAKIINNTENLVRELLAVPDNYKVIFLQGGGCGQFSAVPLNLIGLKAGRCADYVVTGAWSAKAAEEAKKFGTINIVHPKLGSYTKIPDPSTWNLNPDASYVYYCANETVHGVEFDFIPDVKGAVLVCDMSSNFLSKPVEVSKFGVIFAGAQKNVGSAGVTVVIVRDDLLGFALRECPSVLEYKVQAGNSSLYNTPPCFSIYVMGLVLEWIKNNGGAAAMEKLSSIKSQTIYEIIDNSQGFYVCPVEPQNRSKMNIPFRIGNAKGDDALEKRFLDKALELNMLSLKGHRSVGGIRASLYNAVTIEDVQKLAAFMKKFLEMHQL

SEQ ID NO: 1024 - protein, 370 aa, synthetic construct
MDAPRQVVNFGPGPAKLPHSVLLEIQKELLDYKGVGISVLEMSHRSSDFAKIINNTENLVRELLAVPDNYKVIFLQGGGCGQFSAVPLNLIGLKAGRCADYVVTGAWSAKAAEEAKKFGTINIVHPKLGSYTKIPDPSTWNLNPDASYVYYCANETVHGVEFDFIPDVKGAVLVCDMSSNFLSKPVDVSKFGVIFAGAQKNVGSAGVTVVIVRDDLLGFALRECPSVLEYKVQAGNSSLYNTPPCFSIYVMGLVLEWIKNNGGAAAMEKLSSIKSQTIYEIIDNSQGFYVCPVEPQNRSKMNIPFRIGNAKGDDALAKRFLDKALELNMLSLKGHRSVGGIRASLYNAVTIEDVQKLAAFMKKFLEMHQL

SEQ ID NO: 1025 - protein, 370 aa, synthetic construct
MDAPRQVVNFGPGPAKLPHSVLLEIQKELLDYKGVGISVLEMSHRSSDFAKIINNTENLVRELLAVPDNYKVIFLQGGGCGQFSAVPLNLIGLKAGRCADYVVTGAWSAKAAEEAKKFGTINIVHPKLGSYTKIPDPSTWNLNPDASYLYYCANETVHGVEFDFIPDVKGAVLVCDMSSNFLSKPVDVSKFGVIFAGAQKNVGSAGVTVVIVRDDLLGFALRECPSVLEYKVQAGNSSLYNTPPCFSIYVMGLVLEWIKNNGGAAAMEKLSSIKSQTIYEIIDNSQGFYVCPVEPQNRSKMNIPFRIGNAKGDDALEKRFLDKALELNMLSLKGHRSVGGIRASLYNAVTIEDVQKLAAFMKKFLEMHQL

SEQ ID NO: 1026 - protein, 370 aa, synthetic construct
MDAPRQVVNFGPGPAKLPHSVLLEIQKELLDYKGVGISVLEMSHRSSDFAKIINNTENLVRALLAVPDNYKVIFLQGGGCGQFSAVPLNLIGLKAGRCADYVVTGAWSAKAAEEAKKFGTINIVHPKLGSYTKIPDPSTWNLNPDASYVYYCANETVHGVEFDFIPDVKGAVLVCDMSSNFLSKPVDVSKFGVIFAGAQKNVGSAGVTVVIVRDDLLGFALRECPSVLEYKVQAGNSSLYNTPPCFSIYVMGLVLEWIKNNGGAAAMEKLSSIKSQTIYEIIDNSQGFYVCPVEPQNRSKMNIPFRIGNAKGDDALEKRFLDKALELNMLSLKGHRSVGGIRASLYNAVTIEDVQKLAAFMKKFLEMHQL

SEQ ID NO: 1027 - protein, 370 aa, synthetic construct
MDAPRQVVNFGPGPAKLPHSVLLEIQKELLDYKGVGISVLEMSHRSSDFAKIINNTENLVRELLAVPDNYKVIFLQGGGCGQFSAVPLNLIGLKAGRCADYVVTGAWSAKAAEEAKKFGTINIVHPKLGCYTKIPDPSTWNLNPDASYVYYCANETVHGVEFDFIPDVKGAVLVCDMSSNFLSKPVDVSKFGVIFAGAQKNVGSAGVTVVIVRDDLLGFALRECPSVLEYKVQAGNSSLYNTPPCFSIYVMGLVLEWIKNNGGAAAMEKLSSIKSQTIYEIIDNSQGFYVCPVEPQNRSKMNIPFRIGNAKGDDALEKRFLDKALELNMLSLKGHRSVGGIRASLYNAVTIEDVQKLAAFMKKFLEMHQL

SEQ ID NO: 1028 - protein, 370 aa, synthetic construct
MDAPRQVVNFGPGPAKLPHSVLLEIQKELLDYKGVGISVLEMSHRSSDFAKIINNTENLVRELLAVPDNYKVIFLQGGGCGQFSAVPLNLIGLKAGRCADYVVTGAWSAKAAEEAKKFGTINIVHPKLGSYTKIPDPSTWNLNPDASYVYYCANETVHGVEFDFIPDVKGAVLVCDMSSNFLSKPVDVSKFGVIFAGAQKNVGSAGVTVVIVRDDLLGFALRECPSVLEYKVQAGNSSLYNTPPCFSIYVMGLVLEWIKNNGGASAMEKLSSIKSQTIYEIIDNSQGFYVCPVEPQNRSKMNIPFRIGNAKGDDALEKRFLDKALELNMLSLKGHRSVGGIRASLYNAVTIEDVQKLAAFMKKFLEMHQL

SEQ ID NO: 1029 - protein, 370 aa, synthetic construct
MDAPRQVVNFGPGPAKLPHSVLLEIQKELLDYKGVGISVLEMSHRSSDFAKIINNTENLVRELLAVPDNYKVIFLQGGGCGQFSAVPLNLIGLKAGRCADYVVTGAWSAKAAEEAKKFGTINIVHPKLGSYTKIPDPSTWNLNPEASYVYYCANETVHGVEFDFIPDVKGAVLVCDMSSNFLSKPVDVSKFGVIFAGAQKNVGSAGVTVVIVRDDLLGFALRECPSVLEYKVQAGNSSLYNTPPCFSIYVMGLVLEWIKNNGGAAAMEKLSSIKSQTIYEIIDNSQGFYVCPVEPQNRSKMNIPFRIGNAKGDDALEKRFLDKALELNMLSLKGHRSVGGIRASLYNAVTIEDVQKLAAFMKKFLEMHQL

SEQ ID NO: 1030 - protein, 370 aa, synthetic construct
MDAPRQVVNFGPGPAKLPHSVLLEIQKELLDYKGVGISVLEMSHRSSDFAKIINNTENLVRELLAVPDNYKVIFLQGGGCGQFSAVPLNLIGLKAGRCADYVVTGAWSAKAAEEAKKFGTINIVHPKLGSYTKIPDPSTWNLNPDASYVYYCANETVHGVEFDFIPDVKGAVLVCDMSSNFLSKPVDVSKFGVIFAGAQKNIGSAGVTVVIVRDDLLGFALRECPSVLEYKVQAGNSSLYNTPPCFSIYVMGLVLEWIKNNGGAAAMEKLSSIKSQTIYEIIDNSQGFYVCPVEPQNRSKMNIPFRIGNAKGDDALEKRFLDKALELNMLSLKGHRSVGGIRASLYNAVTIEDVQKLAAFMKKFLEMHQL

SEQ ID NO: 1031 - protein, 370 aa, synthetic construct
MDAPRQVVNFGPGPAKLPHSVLLEIQKELLDYKGVGISVLEMSHRSSDFAKIINNTENLVRELLAVPDNYKVIFLQGGGCGQFSAVPLNLIGLKAGRCADYVVTGAWSAKAAEEAKKFGTIHIVHPKLGSYTKIPDPSTWNLNPDASYVYYCANETVHGVEFDFIPDVKGAVLVCDMSSNFLSKPVDVSKFGVIFAGAQKNVGSAGVTVVIVRDDLLGFALRECPSVLEYKVQAGNSSLYNTPPCFSIYVMGLVLEWIKNNGGAAAMEKLSSIKSQTIYEIIDNSQGFYVCPVEPQNRSKMNIPFRIGNAKGDDALEKRFLDKALELNMLSLKGHRSVGGIRASLYNAVTIEDVQKLAAFMKKFLEMHQL

SEQ ID NO: 1032 - protein, 370 aa, synthetic construct
MDAPRQVVNFGPGPAKLPHSVLLEIQKELLDYKGVGISVLEMSHRSSDFAKIINNTENLVRELLAVPDNYKVIFLQGGGCGEFSAVPLNLIGLKAGRCADYVVTGAWSAKAAEEAKKFGTINIVHPKLGSYTKIPDPSTWNLNPDASYVYYCANETVHGVEFDFIPDVKGAVLVCDMSSNFLSKPVDVSKFGVIFAGAQKNVGSAGVTVVIVRDDLLGFALRECPSVLEYKVQAGNSSLYNTPPCFSIYVMGLVLEWIKNNGGAAAMEKLSSIKSQTIYEIIDNSQGFYVCPVEPQNRSKMNIPFRIGNAKGDDALEKRFLDKALELNMLSLKGHRSVGGIRASLYNAVTIEDVQKLAAFMKKFLEMHQL

SEQ ID NO: 1033 - protein, 370 aa, synthetic construct
MDAPRQVVNFGPGPAKLPHSVLLEIQKELLDYKGVGISVLEMSHRSSDFAKIINNTENLVRELQAVPDNYKVIFLQGGGCGQFSAVPLNLIGLKAGRCADYVVTGAWSAKAAEEAKKFGTINIVHPKLGSYTKIPDPSTWNLNPDASYVYYCANETVHGVEFDFIPDVKGAVLVCDMSSNFLSKPVDVSKFGVIFAGAQKNVGSAGVTVVIVRDDLLGFALRECPSVLEYKVQAGNSSLYNTPPCFSIYVMGLVLEWIKNNGGAAAMEKLSSIKSQTIYEIIDNSQGFYVCPVEPQNRSKMNIPFRIGNAKGDDALEKRFLDKALELNMLSLKGHRSVGGIRASLYNAVTIEDVQKLAAFMKKFLEMHQL

SEQ ID NO: 1034 - protein, 370 aa, synthetic construct
MDAPRQVVNFGPGPAKLPHSVLLEIQKELLDYKGVGISVLEMSHRSSDFAKIINNTENLVRELLAVPDNYKVIFLQGGGCGQFSAVPLNLIGLKAGRCADYVVTGAWSAKAAEEAKKFGTINIVHPKLGSYTKIPDPSTWNLNPDASYVYYCANETVHGVEFDFIPDVKGAVLVCDMSSNFLSKPVDVSKFGVIFAGAQKNVGSAGVTVVIVRDDLLGFALRECPSVLEYKVQAGNSSLYNTPPCFSIYVMGLVLEWIKNNGGAAALEKLSSIKSQTIYEIIDNSQGFYVCPVEPQNRSKMNIPFRIGNAKGDDALEKRFLDKALELNMLSLKGHRSVGGIRASLYNAVTIEDVQKLAAFMKKFLEMHQL

SEQ ID NO: 1035 - protein, 370 aa, synthetic construct
MDAPRQVVNFGPGPAKLPHSVLLEIQKELLDYKGVGISVLEMSHRSSDFAKIINNTENFVRELLAVPDNYKVIFLQGGGCGQFSAVPLNLIGLKAGRCADYVVTGAWSAKAAEEAKKFGTINIVHPKLGSYTKIPDPSTWNLNPDASYVYYCANETVHGVEFDFIPDVKGAVLVCDMSSNFLSKPVDVSKFGVIFAGAQKNVGSAGVTVVIVRDDLLGFALRECPSVLEYKVQAGNSSLYNTPPCFSIYVMGLVLEWIKNNGGAAAMEKLSSIKSQTIYEIIDNSQGFYVCPVEPQNRSKMNIPFRIGNAKGDDALEKRFLDKALELNMLSLKGHRSVGGIRASLYNAVTIEDVQKLAAFMKKFLEMHQL

SEQ ID NO: 1036 - protein, 370 aa, synthetic construct
MDAPRQVVNFGPGPAKLPHSVLLEIQKELLDYKGVGISVLEMSHRSSDFAKIINNTENLVRELLAVPDNYKVIFLQGGGCGQFSAVPLNLIGLKAGRCADYVVTGAWSAKAAEEAKKFGTINIVHPKLGGYTKIPDPSTWNLNPDASYVYYCANETVHGVEFDFIPDVKGAVLVCDMSSNFLSKPVDVSKFGVIFAGAQKNVGSAGVTVVIVRDDLLGFALRECPSVLEYKVQAGNSSLYNTPPCFSIYVMGLVLEWIKNNGGAAAMEKLSSIKSQTIYEIIDNSQGFYVCPVEPQNRSKMNIPFRIGNAKGDDALEKRFLDKALELNMLSLKGHRSVGGIRASLYNAVTIEDVQKLAAFMKKFLEMHQL

SEQ ID NO: 1037 - protein, 370 aa, synthetic construct
MDAPRQVVNFGPGPAKLPHSVLLEIQKELLDYKGVGISVLEMSHRSSDFAKIINNTENLVRELLAVPDNYKVIFLQGGGCGQFSAVPLNLIGLKAGRCADYVVTGAWSAKAAEEAKKFGTINIVHPKLGSYTKIPDPSTWNLNPDASYVYYCANETVHGVEFDFIPDVKGAVLVCDMSSNFLSKPVDVSKFGVIFAGAQKNVGSAGVTVVIVRDDLLGFALRECPSVLEYKVQAGNSSLYNTPPCFSFYVMGLVLEWIKNNGGAAAMEKLSSIKSQTIYEIIDNSQGFYVCPVEPQNRSKMNIPFRIGNAKGDDALEKRFLDKALELNMLSLKGHRSVGGIRASLYNAVTIEDVQKLAAFMKKFLEMHQL

SEQ ID NO: 1038 - protein, 370 aa, synthetic construct
MDAPRQVVNFGPGPAKLPHSVLLEIQKELLDYKGVGISVLEMSHRSSDFAKIINNTENLVRELLAVPDNYKVIFLQGGGCGQFSAVPLNLIGLKAGRCADYVVTGAWSAKAAEEAKKFGTINIVHPKLGSYTKIPDPSTWNLNPAASYVYYCANETVHGVEFDFIPDVKGAVLVCDMSSNFLSKPVDVSKFGVIFAGAQKNVGSAGVTVVIVRDDLLGFALRECPSVLEYKVQAGNSSLYNTPPCFSIYVMGLVLEWIKNNGGAAAMEKLSSIKSQTIYEIIDNSQGFYVCPVEPQNRSKMNIPFRIGNAKGDDALEKRFLDKALELNMLSLKGHRSVGGIRASLYNAVTIEDVQKLAAFMKKFLEMHQL

SEQ ID NO: 1039 - protein, 370 aa, synthetic construct
MDAPRQVVNFGPGPAELPHSVLLEIQKELLDYKGVGISVLEMSHRSSDFAKIINNTENLVRELLAVPDNYKVIFLQGGGCGQFSAVPLNLIGLKAGRCADYVVTGAWSAKAAEEAKKFGTINIVHPKLGSYTKIPDPSTWNLNPDASYVYYCANETVHGVEFDFIPDVKGAVLVCDMSSNFLSKPVDVSKFGVIFAGAQKNVGSAGVTVVIVRDDLLGFALRECPSVLEYKVQAGNSSLYNTPPCFSIYVMGLVLEWIKNNGGAAAMEKLSSIKSQTIYEIIDNSQGFYVCPVEPQNRSKMNIPFRIGNAKGDDALEKRFLDKALELNMLSLKGHRSVGGIRASLYNAVTIEDVQKLAAFMKKFLEMHQL

SEQ ID NO: 1040 - protein, 370 aa, synthetic construct
MDAPRQVVNFGPGPAKLPHSVLLEIQKELLDYKGVGISVLEMSHRSSDFAKIINNTENLVRELLAVPDNYKVIFLQGGGCGQFSAVPLNLIGLKAGRCADYVVTGAWSAKAAEEAKKFGTINIVHPKLGSYTKIPDPSTWNLNPDASYVYYCANETVHGVEFDFIPDVKGAVLVCDMSSNFLSKPVDVSKFGVIFAGAQKNVGSAGVTVVIVRDDLLGFALRECPSVLEYKVQAGNGSLYNTPPCFSIYVMGLVLEWIKNNGGAAAMEKLSSIKSQTIYEIIDNSQGFYVCPVEPQNRSKMNIPFRIGNAKGDDALEKRFLDKALELNMLSLKGHRSVGGIRASLYNAVTIEDVQKLAAFMKKFLEMHQL

SEQ ID NO: 1041 - protein, 370 aa, synthetic construct
MDAPRQVVNFGPGPAKLPHSVLLEIQKELLDYKGVGISVLEMSHRSSDFAKIINNTENLVRELLAVPDNYKVIFLQGGGCGQFSAVPLNLIGLKAGRCADYVVTGAWSAKAAEEAKKFGTINIVHPKLGSYTKIPDPSTWNLNPDASYVYYCANETVHGVEFDFIPEVKGAVLVCDMSSNFLSKPVDVSKFGVIFAGAQKNVGSAGVTVVIVRDDLLGFALRECPSVLEYKVQAGNSSLYNTPPCFSIYVMGLVLEWIKNNGGAAAMEKLSSIKSQTIYEIIDNSQGFYVCPVEPQNRSKMNIPFRIGNAKGDDALEKRFLDKALELNMLSLKGHRSVGGIRASLYNAVTIEDVQKLAAFMKKFLEMHQL

SEQ ID NO: 1042 - protein, 370 aa, synthetic construct
MDAPRQVVNFGPGPAKLPHSVLLEIQKELLDYKGVGISVLEMSHRSSDFAKIINNTENLVRELLAVPDNYKVIFLQGGGCGQFSAVPLNLIGLKAGRCADYVVTGAWSAKAAEEAKKFGTINIVHPKLGSYTKIPDPSTWNLNPDASYVHYCANETVHGVEFDFIPDVKGAVLVCDMSSNFLSKPVDVSKFGVIFAGAQKNVGSAGVTVVIVRDDLLGFALRECPSVLEYKVQAGNSSLYNTPPCFSIYVMGLVLEWIKNNGGAAAMEKLSSIKSQTIYEIIDNSQGFYVCPVEPQNRSKMNIPFRIGNAKGDDALEKRFLDKALELNMLSLKGHRSVGGIRASLYNAVTIEDVQKLAAFMKKFLEMHQL

SEQ ID NO: 1043 - protein, 370 aa, synthetic construct
MDAPRQVVNFGPGPAKLPHSVLLEIQKELLDYKGVGISVLEMSHRSSDFAKIINNTENLVRELLAVPDNYKVIFLQGGGCGQFSAVPLNLIGLKAGRCADYVVTGAWSAKAAEEAKKFGTINIVHPKLGSYTKIPDPSTWNLNPDASYVYYCANETVHGVEFDFIPDVKGAVLVCDMSSNFLSKPVDVSKFGVIFAGAQKNVGSAGVTVVIVRDDLLGFALRECPSVLEYKVQAGNSSLYNTPPCFSIYVMGLVLEWIKNNGGAAAMEKLSSIKSQTIYEIIDNSLGFYVCPVEPQNRSKMNIPFRIGNAKGDDALEKRFLDKALELNMLSLKGHRSVGGIRASLYNAVTIEDVQKLAAFMKKFLEMHQL

SEQ ID NO: 1044 - protein, 370 aa, synthetic construct
MDAPRQVVNFGPGPAKLPHSVLLEIQKELLDYKGVGISVLEMSHRSSDFAKIINNTENLVRELLAVPDNYKVIFLQGGGCGQFSAVPLNLIGLKAGRCADYVVTGAWSAKAAEEAKKFGTINIVHPKLGSYTKIPDPSTWNLNPDASYVYYCANETVHGVEFDFIPDVKGAVLVCDMSSNFLSKPVDVSKFGVIFAGAQKNVGSAGVTVVIVRDDLLGFALRECPSVLEYKVQAGNSSLYNTPPCFSIYVMGLVLEWIKNNGGAAAMEKLSSIKSQTIYEIIDNSQGFYVCPVEPQYRSKMNIPFRIGNAKGDDALEKRFLDKALELNMLSLKGHRSVGGIRASLYNAVTIEDVQKLAAFMKKFLEMHQL

SEQ ID NO: 1045 - protein, 370 aa, synthetic construct
MDAPRQVVNFGPGPAKLPHSVLLEIQKELLDYKGVGISVLEMSHRSSDFAKIINNTENLVRELLAVPDNYKVIFLQGGGCGQFSAVPLNLIGLKEGRCADYVVTGAWSAKAAEEAKKFGTINIVHPKLGSYTKIPDPSTWNLNPDASYVYYCANETVHGVEFDFIPDVKGAVLVCDMSSNFLSKPVDVSKFGVIFAGAQKNVGSAGVTVVIVRDDLLGFALRECPSVLEYKVQAGNSSLYNTPPCFSIYVMGLVLEWIKNNGGAAAMEKLSSIKSQTIYEIIDNSQGFYVCPVEPQNRSKMNIPFRIGNAKGDDALEKRFLDKALELNMLSLKGHRSVGGIRASLYNAVTIEDVQKLAAFMKKFLEMHQL

SEQ ID NO: 1046 - protein, 370 aa, synthetic construct
MDAPRQVVNFGPGPAKLPHSVLLEIQKELLDYKGVGISVLEMSHRSSDFAKIINNTENLVRELLAVPDNYKVIFLQGGGCGQFSAVPLNLIGLKAGRCADYVVTGAWSAKAAEEAKKFGTINIVHPKLGSYTKIPDPSTWNLNPDASYVYYCANETVHGVEFDFIPDVKGAVLVCDMSSNFLSKPVDVSKFGVIFAGAQKNVGSAGVTVVIVRDDLLGFALRECPSVLEYKVQAGNSSLYNTPPCFSIYVMGLVLEWIKNNGGAAAMEKLSSIKSQTIYEIIDNSQGFYVCPVEPQNRSNMNIPFRIGNAKGDDALEKRFLDKALELNMLSLKGHRSVGGIRASLYNAVTIEDVQKLAAFMKKFLEMHQL

SEQ ID NO: 1047 - protein, 370 aa, synthetic construct
MDAPRQVVNFGPGPAKLPHSVLLEIQKELLDYKGVGISVLEMSHRSSDFAKIINNTENLVRELLAVPDNYKVIFLQGGGCGQFSAVPLNLIGLKAGRCADYVVTGAWSAKAAEEAKKFGTINIVHPKLGSYTKIPDPSTWNLNPDASYVYYCANETVHGVEFDFIPDVKGAVLVCDMSSNFLSKPVDVSKFGVIFAGAQKNVGSAGVTVVIVRDDLLGFALRECPSVLEYKVQAGNSSLYNTPPCFTIYVMGLVLEWIKNNGGAAAMEKLSSIKSQTIYEIIDNSQGFYVCPVEPQNRSKMNIPFRIGNAKGDDALEKRFLDKALELNMLSLKGHRSVGGIRASLYNAVTIEDVQKLAAFMKKFLEMHQL

SEQ ID NO: 1048 - protein, 370 aa, synthetic construct
MDAPRQVVNFGPGPAKLPHSVLLEIQKELLDYQGVGISVLEMSHRSSDFAKIINNTENLVRELLAVPDNYKVIFLQGGGCGQFSAVPLNLIGLKAGRCADYVVTGAWSAKAAEEAKKFGTINIVHPKLGSYTKIPDPSTWNLNPDASYVYYCANETVHGVEFDFIPDVKGAVLVCDMSSNFLSKPVDVSKFGVIFAGAQKNVGSAGVTVVIVRDDLLGFALRECPSVLEYKVQAGNSSLYNTPPCFSIYVMGLVLEWIKNNGGAAAMEKLSSIKSQTIYEIIDNSQGFYVCPVEPQNRSKMNIPFRIGNAKGDDALEKRFLDKALELNMLSLKGHRSVGGIRASLYNAVTIEDVQKLAAFMKKFLEMHQL

SEQ ID NO: 1049 - protein, 370 aa, synthetic construct
MDAPRQVVNFGPGPAKLPHSVLLEIQKELLDYKGVGISVLEMSHRSSDFAKIINNTENLVRELLAVPDNYKVIFLQGGGCGQFSAVPLNLIGLKAGRCADYVVTGAWSAKAAEEAKKFGTINTVHPKLGSYTKIPDPSTWNLNPDASYVYYCANETVHGVEFDFIPDVKGAVLVCDMSSNFLSKPVDVSKFGVIFAGAQKNVGSAGVTVVIVRDDLLGFALRECPSVLEYKVQAGNSSLYNTPPCFSIYVMGLVLEWIKNNGGAAAMEKLSSIKSQTIYEIIDNSQGFYVCPVEPQNRSKMNIPFRIGNAKGDDALEKRFLDKALELNMLSLKGHRSVGGIRASLYNAVTIEDVQKLAAFMKKFLEMHQL

SEQ ID NO: 1050 - protein, 370 aa, synthetic construct
MDAPRQVVNFGPGPAKLPHSVLLEIQKELLDYKGVGISVLEMSHRSSDFAKIINNTENLVRELLAVPDNYKVIFLQGGGCGQFSAVPLNLIGLKAGRCADYVVTGAWSAKAAEEAKKFGTINIVHPKLGSYTKIPDPSTWNLNPDASYVYYCANETVHGVEFDFIPDVKGAVLVCDMSSNFLSKPVDVSKFGVIFAGAQKNVGSAGVTVVIVRDDLLGFALRECPSVLEYKVQAGNSSLYNTPPCFSIYVMGLVLEWIKNNGGAAAMEELSSIKSQTIYEIIDNSQGFYVCPVEPQNRSKMNIPFRIGNAKGDDALEKRFLDKALELNMLSLKGHRSVGGIRASLYNAVTIEDVQKLAAFMKKFLEMHQL

SEQ ID NO: 1051 - protein, 370 aa, synthetic construct
MDAPRQVVNFGPGPAKLPHSVLLEIQKELLDYKGVGISVLEMSHRSSDFAKIINNTENLVRELLAVPDNYKVIFLQGGGCGQFSAVPLNLIGLKAGRCADYVVTGAWSAKAAEEAKKFGTINIVHPKLGSYTKIPDPSTWNLNPDASYVYYCANETVHGVEFDFIPDVKGAVLVCDMSSNFLSKPVDVSKFGVIFAGAQKNVGSAGVTVVIVRDDLLGFALRECPSVLEYKVQAGNSSLYNTPPCFSIYVTGLVLEWIKNNGGAAAMEKLSSIKSQTIYEIIDNSQGFYVCPVEPQNRSKMNIPFRIGNAKGDDALEKRFLDKALELNMLSLKGHRSVGGIRASLYNAVTIEDVQKLAAFMKKFLEMHQL

SEQ ID NO: 1052 - protein, 370 aa, synthetic construct
MDAPRQVVNFGPGPAKLPHSVLLEIQKELLDYKGVGISVLEMSHRSSDFAKIINNTENLVRELLAVPDNYKVIFLQGGGCGQFSAVPLNLIGLKAGRCADYVVTGAWSAKAAEEAKKFGTINIVHPKLGSYTKIPDPSTWNLNPDASYVYYCGNETVHGVEFDFIPDVKGAVLVCDMSSNFLSKPVDVSKFGVIFAGAQKNVGSAGVTVVIVRDDLLGFALRECPSVLEYKVQAGNSSLYNTPPCFSIYVMGLVLEWIKNNGGAAAMEKLSSIKSQTIYEIIDNSQGFYVCPVEPQNRSKMNIPFRIGNAKGDDALEKRFLDKALELNMLSLKGHRSVGGIRASLYNAVTIEDVQKLAAFMKKFLEMHQL

SEQ ID NO: 1053 - protein, 370 aa, synthetic construct
MDAPRQVVNFGPGPAKLPHSVLLEIQKELLDYKGVGISVLEMSHRSSDFAKIINNTENLVRELLAVPDNYKVIFLQGGGCGQFSAVPLNLIGLKAGRCADYVVTGAWSAKAAEEAKKFGTINIVHPKLGSYTKIPDPSTWNLNPDASYVYYCANETVHGVEFDFIPDVKGAVLVCDMSSNFLSKPVDVSKFGVIFAGAQKNVGSAGVTVVIVRDDLLGFALRECPSVLEFKVQAGNSSLYNTPPCFSIYVMGLVLEWIKNNGGAAAMEKLSSIKSQTIYEIIDNSQGFYVCPVEPQNRSKMNIPFRIGNAKGDDALEKRFLDKALELNMLSLKGHRSVGGIRASLYNAVTIEDVQKLAAFMKKFLEMHQL

SEQ ID NO: 1054 - protein, 370 aa, synthetic construct
MDAPRQVVNFGPGPAKLPHSVLLEIQKELLDYKGVGISVLEMSHRSSDFAKIINNTENLVRELLAVPDNYKVIFLQGGGCGQFSAVPLNLIGLKAGRCADYVVTGAWSAKAAEEAKKFGTINIVHPKLGSYTKIRDPSTWNLNPDASYVYYCANETVHGVEFDFIPDVKGAVLVCDMSSNFLSKPVDVSKFGVIFAGAQKNVGSAGVTVVIVRDDLLGFALRECPSVLEYKVQAGNSSLYNTPPCFSIYVMGLVLEWIKNNGGAAAMEKLSSIKSQTIYEIIDNSQGFYVCPVEPQNRSKMNIPFRIGNAKGDDALEKRFLDKALELNMLSLKGHRSVGGIRASLYNAVTIEDVQKLAAFMKKFLEMHQL

SEQ ID NO: 1055 - protein, 370 aa, synthetic construct
MDAPRQVVNFGPGPAKLPHSVLLEIQKELLDYKGVGISVLEMSHRSSDFAKIINNTENLVRELLAVPDNYKVIFLQGGGCGQFSAVPLNLIGLKAGRCADYVVTGAWSAKAAEEAKKFGTINIVHPKLGSYTKIPDPSTWNLNPDASYVYYCANETVHGVEFDVIPDVKGAVLVCDMSSNFLSKPVDVSKFGVIFAGAQKNVGSAGVTVVIVRDDLLGFALRECPSVLEYKVQAGNSSLYNTPPCFSIYVMGLVLEWIKNNGGAAAMEKLSSIKSQTIYEIIDNSQGFYVCPVEPQNRSKMNIPFRIGNAKGDDALEKRFLDKALELNMLSLKGHRSVGGIRASLYNAVTIEDVQKLAAFMKKFLEMHQL

SEQ ID NO: 1056 - protein, 370 aa, synthetic construct
MDAPRQVVNFGPGPAKLPHSVLLEIQKELLDYKGVGISVLEMSHRSSDFAKIINNTENLVRELLAVPDNYKVIFLQGGGCGQFSAVPLNLIGLKAGRCADYVVTGAWSAKAAEEAKKFGTINIVHPKLGSYTKIPDPSTWNLNPDASYVYYCANETVHGVEFDFIPDVKGPVLVCDMSSNFLSKPVDVSKFGVIFAGAQKNVGSAGVTVVIVRDDLLGFALRECPSVLEYKVQAGNSSLYNTPPCFSIYVMGLVLEWIKNNGGAAAMEKLSSIKSQTIYEIIDNSQGFYVCPVEPQNRSKMNIPFRIGNAKGDDALEKRFLDKALELNMLSLKGHRSVGGIRASLYNAVTIEDVQKLAAFMKKFLEMHQL

SEQ ID NO: 1057 - protein, 370 aa, synthetic construct
MDAPRQVVNFGPGPAKLPHSVLLEIQKELLDYKGVGISVLEMSHRSSDFAKIINNTENLVRELLAVPDNYKVIFLQGGGCGQFSAVPLNLIGLKAGRCADYVVTGAWSAKAAEEAKKFGTINIVHPKLGSYTKIPDPSTWNLNPYASYVYYCANETVHGVEFDFIPDVKGAVLVCDMSSNFLSKPVDVSKFGVIFAGAQKNVGSAGVTVVIVRDDLLGFALRECPSVLEYKVQAGNSSLYNTPPCFSIYVMGLVLEWIKNNGGAAAMEKLSSIKSQTIYEIIDNSQGFYVCPVEPQNRSKMNIPFRIGNAKGDDALEKRFLDKALELNMLSLKGHRSVGGIRASLYNAVTIEDVQKLAAFMKKFLEMHQL

SEQ ID NO: 1058 - protein, 370 aa, synthetic construct
MDAPRQVVNFGPGPAKLPHSVLLEIQKELLDYKGVGISVLEMSHRSSDFAKIINNTENLVRELLAVPDNYKVIFLQGGGCGQFSAVPLNLIGLKAGRCADYVVTGAWSAKAAEEAKKFGTINIVHPKLGSYTKIPDPSTWNLNPDASYVYYCANETVHGVEFDFIPDVKGAVLVCDMSSNFLSKPVDVSKFGVIFAGAQKNVGSAGVTVVIVRDDLLGFALRECPSVLEYKVQAGNSSLYNTPPCFSIYVMGLVLEWIKNNGGAAAMEKLSSIKSQTIYEIIDNSQGFYVCPVEPQNRSKMNIPFRIGNAKGDDALEKRFLDKALELTMLSLKGHRSVGGIRASLYNAVTIEDVQKLAAFMKKFLEMHQL

SEQ ID NO: 1059 - protein, 370 aa, synthetic construct
MDAPRQVVNFGPGPAKLPHSVLLEIQKELLDYKGVGISVLEMSHRSSDFAKIINNTENLVRELLAVPDNYKVIFLQGGGCGQFSAVPLNLIGLKAGRCADYVVTGAWSAKAAEEAKKFGTINIVHPKLGSYTKIPDPSTWNLNPDASYVYYCANETVHGVEFDFIPDVKGAVLVCDMSSNFLSKPVDVSKFGVIFAGAQKNVGSAGVTVVIVRDDLLGFALRECPSVLEYKVQAGNSSLYNTPPCFSIYVMGLVLEWIKNNGGAAAMEKVSSIKSQTIYEIIDNSQGFYVCPVEPQNRSKMNIPFRIGNAKGDDALEKRFLDKALELNMLSLKGHRSVGGIRASLYNAVTIEDVQKLAAFMKKFLEMHQL

SEQ ID NO: 1060 - protein, 370 aa, synthetic construct
MDAPRQVVNFGPGPAKLPHSVLLEVQKELLDYKGVGISVLEMSHRSSDFAKIINNTENLVRELLAVPDNYKVIFLQGGGCGQFSAVPLNLIGLKAGRCADYVVTGAWSAKAAEEAKKFGTINIVHPKLGSYTKIPDPSTWNLNPDASYVYYCANETVHGVEFDFIPDVKGAVLVCDMSSNFLSKPVDVSKFGVIFAGAQKNVGSAGVTVVIVRDDLLGFALRECPSVLEYKVQAGNSSLYNTPPCFSIYVMGLVLEWIKNNGGAAAMEKLSSIKSQTIYEIIDNSQGFYVCPVEPQNRSKMNIPFRIGNAKGDDALEKRFLDKALELNMLSLKGHRSVGGIRASLYNAVTIEDVQKLAAFMKKFLEMHQL

SEQ ID NO: 1061 - protein, 370 aa, synthetic construct
MDAPRQVVNFGPGPAKLPHSVLLEIQKELLDYKGVGISVLEMSHRSSDFAKIINNTENLVRELLAVPDNYKVIFLQGGGCGQFSAVPLNLIGLKAGRCADYVVTGAWSAKAAEEAKKFGTLNIVHPKLGSYTKIPDPSTWNLNPDASYVYYCANETVHGVEFDFIPDVKGAVLVCDMSSNFLSKPVDVSKFGVIFAGAQKNVGSAGVTVVIVRDDLLGFALRECPSVLEYKVQAGNSSLYNTPPCFSIYVMGLVLEWIKNNGGAAAMEKLSSIKSQTIYEIIDNSQGFYVCPVEPQNRSKMNIPFRIGNAKGDDALEKRFLDKALELNMLSLKGHRSVGGIRASLYNAVTIEDVQKLAAFMKKFLEMHQL

SEQ ID NO: 1062 - protein, 370 aa, synthetic construct
MDAPRQVVNFGPGPAKLPHSVLLEIQKELLDYKGVGISVLEMSHRSSDFAKIINNTENLVRELLAVPDNYKVIFLQGGGCGQFSAVPLNLIGLKAGRCADYVVTGAWSAKAAEEAKKFGTINIVHPKLGSYTKIPDPSTWNLNPDASYVYYCANETVHGVEFDFIPDVKGAVLVCDMSSNFLSKPVDVCKFGVIFAGAQKNVGSAGVTVVIVRDDLLGFALRECPSVLEYKVQAGNSSLYNTPPCFSIYVMGLVLEWIKNNGGAAAMEKLSSIKSQTIYEIIDNSQGFYVCPVEPQNRSKMNIPFRIGNAKGDDALEKRFLDKALELNMLSLKGHRSVGGIRASLYNAVTIEDVQKLAAFMKKFLEMHQL

SEQ ID NO: 1063 - protein, 370 aa, synthetic construct
MDAPRQVVNFGPGPAKLPHSVLLEIQKELLDYKGVGISVLEMSHRSSDFAKIINNTENLVRELLAVPDNYKVIFLQGGGCGQFSAVPLNLIGLKAGRCADYVVTGAWSAKAAEEAKKFGTINIVHPKLGSYTKIPDPSTWNLNPDASYVYYCANETVHGVEFDFIPDVKGAVLVCDMSSNFLSKPVDVSKFGVIFAGAQKNVGSAGVTVVIVRDDLLGFALRECPSVLEYKVQAGNSSLYNTPPCFSIYVMGLVLEWIKNNGGAASMEKLSSIKSQTIYEIIDNSQGFYVCPVEPQNRSKMNIPFRIGNAKGDDALEKRFLDKALELNMLSLKGHRSVGGIRASLYNAVTIEDVQKLAAFMKKFLEMHQL

SEQ ID NO: 1064 - protein, 370 aa, synthetic construct
MDAPRQVVNFGPGPAKLPHSVLLEIQKELLDYKGGGISVLEMSHRSSDFAKIINNTENLVRELLAVPDNYKVIFLQGGGCGQFSAVPLNLIGLKAGRCADYVVTGAWSAKAAEEAKKFGTINIVHPKLGSYTKIPDPSTWNLNPDASYVYYCANETVHGVEFDFIPDVKGAVLVCDMSSNFLSKPVDVSKFGVIFAGAQKNVGSAGVTVVIVRDDLLGFALRECPSVLEYKVQAGNSSLYNTPPCFSIYVMGLVLEWIKNNGGAAAMEKLSSIKSQTIYEIIDNSQGFYVCPVEPQNRSKMNIPFRIGNAKGDDALEKRFLDKALELNMLSLKGHRSVGGIRASLYNAVTIEDVQKLAAFMKKFLEMHQL

SEQ ID NO: 1065 - protein, 370 aa, synthetic construct
MDAPRQVVNFGPGPAKLPHSVLLEIQKELLDYKGVGISVLEMSHRSSDFAKIINNTENLVRELLAVPDNYKVIFLQGGGCGQFSAVPLNLIGLKAGRSADYVVTGAWSAKAAEEAKKFGTINIVHPKLGSYTKIPDPSTWNLNPDASYVYYCANETVHGVEFDFIPDVKGAVLVCDMSSNFLSKPVDVSKFGVIFAGAQKNVGSAGVTVVIVRDDLLGFALRECPSVLEYKVQAGNSSLYNTPPCFSIYVMGLVLEWIKNNGGAAAMEKLSSIKSQTIYEIIDNSQGFYVCPVEPQNRSKMNIPFRIGNAKGDDALEKRFLDKALELNMLSLKGHRSVGGIRASLYNAVTIEDVQKLAAFMKKFLEMHQL

SEQ ID NO: 1066 - protein, 370 aa, synthetic construct
MDAPRQVVNFGPGPAKLPHSVLLEIQKELLDYKGVGISVLEMSHRSSDFAKIINNTENLVRELLAVPDNYKVIFLQGGGCGQFSAVPLNLIGLKAGRCADYVVTGAWSAKAAEEAKKFGTINIVHPKLGSYTKIPDPSTWNLNPDASYVYYCANETVHGVEFDFIPDVKGAVLVCDMSSNFLSKPVDVSKFGVIFAGAQKNVGSAGVTVVIVRDDLLGFALRECPSVLEYKVQAGNSSLYNTPPCFSIYVMGLVLEWIKNNGGAAAMEKLSSIKSQTIYEIIDNSQGFYVCPVEPQNRSKTNIPFRIGNAKGDDALEKRFLDKALELNMLSLKGHRSVGGIRASLYNAVTIEDVQKLAAFMKKFLEMHQL

SEQ ID NO: 1067 - protein, 370 aa, synthetic construct
MDAPRQVVNFGPGPAKLPHSVLLEIQKELLDYKGVGISVLEMSHRSSDFAKIINNTENLVRELLAVPDNYKVIFLQGGGCGQFSAVPLNLIGLKAGRCADYVVTGAWSAKAAEEAKKFGTINIVHPKLGSYTKIPDPSTWNLNPDASYVYYCANETVHGVEFDFIPDVKGAVLVCDMSSNFLSKPVDVSKFGVIFAGAQKNVGSAGVTVVILRDDLLGFALRECPSVLEYKVQAGNSSLYNTPPCFSIYVMGLVLEWIKNNGGAAAMEKLSSIKSQTIYEIIDNSQGFYVCPVEPQNRSKMNIPFRIGNAKGDDALEKRFLDKALELNMLSLKGHRSVGGIRASLYNAVTIEDVQKLAAFMKKFLEMHQL

SEQ ID NO: 1068 - protein, 370 aa, synthetic construct
MDAPRQMVNFGPGPAKLPHSVLLEIQKELLDYKGVGISVLEMSHRSSDFAKIINNTENLVRELLAVPDNYKVIFLQGGGCGQFSAVPLNLIGLKAGRCADYVVTGAWSAKAAEEAKKFGTINIVHPKLGSYTKIPDPSTWNLNPDASYVYYCANETVHGVEFDFIPDVKGAVLVCDMSSNFLSKPVDVSKFGVIFAGAQKNVGSAGVTVVIVRDDLLGFALRECPSVLEYKVQAGNSSLYNTPPCFSIYVMGLVLEWIKNNGGAAAMEKLSSIKSQTIYEIIDNSQGFYVCPVEPQNRSKMNIPFRIGNAKGDDALEKRFLDKALELNMLSLKGHRSVGGIRASLYNAVTIEDVQKLAAFMKKFLEMHQL

SEQ ID NO: 1069 - protein, 370 aa, synthetic construct
MDAPRQVVNFGPGPAKLPHSVLLEIQKELLDYKGVGISVLEMSHRSSDFAKIINNTENLVRELLAVPDNYKVIFLQGGGCGQFSAVPLNLIGLKAGRCADYVVTGAWSAKAAEEAKKFGTINIVHPKLGSYTKIPDPSTWNLNPDASYVYYCANETVHGVEFDFIPNVKGAVLVCDMSSNFLSKPVDVSKFGVIFAGAQKNVGSAGVTVVIVRDDLLGFALRECPSVLEYKVQAGNSSLYNTPPCFSIYVMGLVLEWIKNNGGAAAMEKLSSIKSQTIYEIIDNSQGFYVCPVEPQNRSKMNIPFRIGNAKGDDALEKRFLDKALELNMLSLKGHRSVGGIRASLYNAVTIEDVQKLAAFMKKFLEMHQL

SEQ ID NO: 1070 - protein, 370 aa, synthetic construct
MDAPRQVVNFGPGPAKLPHSVLLEIQKELLDYKGVGISVLEMSHRSSDFAKIINNTENLVRELLAVPDNYKVIFLQGGGCGQFSAVPLNLIGLKAGRCADYVVTGAWSAKAAEEAKKFGTMNIVHPKLGSYTKIPDPSTWNLNPDASYVYYCANETVHGVEFDFIPDVKGAVLVCDMSSNFLSKPVDVSKFGVIFAGAQKNVGSAGVTVVIVRDDLLGFALRECPSVLEYKVQAGNSSLYNTPPCFSIYVMGLVLEWIKNNGGAAAMEKLSSIKSQTIYEIIDNSQGFYVCPVEPQNRSKMNIPFRIGNAKGDDALEKRFLDKALELNMLSLKGHRSVGGIRASLYNAVTIEDVQKLAAFMKKFLEMHQL

SEQ ID NO: 1071 - protein, 370 aa, synthetic construct
MDAPRQVVNFGPGPAKLPHSVLLEIQKELLDYKGVGISVLEMSHRSSDFAKIINNTENLVRELLAVPDNYKVIFLQGGGCGQFSAVPLNLIGLKAGRCADYVVTGAWSAKAAEEAKKFGTINIVHPKLGSYTKIPDPSTWNLNPDASYVYYCANETVHGVEFDFIPDVKGAVLVCDMSSNFLSKPVDVSKFGVIFAGAQKNVGSAGVTVVIVRDDLLGFALRECPSVLEYKVQAGNSSLYNTPPCFSIYVMGLVLEWIKNNGGAAAMEKLSSIKSQTIYEIIDNSQGFYVCPVEPQNRSKMNIPFRIGNAKGDDALEKRFLDKALELNMLSLKGHRSVGGIRASLYNAVIIEDVQKLAAFMKKFLEMHQL

SEQ ID NO: 1072 - protein, 370 aa, synthetic construct
MDAPRQVVNFGPGPAKLPHSVLLEIQKELLDYKGVGISVLEMSHRSSDFAKIINNTENLVRELLAVPDNYKVIFLQGGGCGQFSAVPLNLIGLKAGRCADYVVTGAWSAKAAEEAKKFGTINIVHPKLGSYTKIPDPSTWNLNPDASYVYYCANETVHGVEFDFIPDVKGAVLVCDMSSNFLSKPVDVSKFGVIFAGAQKNVGSAGVTVVIVRDDLLGFALRECPSVLEYKVQAGNSSLYNTPPCFSIYVMGLVLEWIKNNGGAAAMEKLSSIKSQTIYEIIDNSQGFYVCPVETQNRSKMNIPFRIGNAKGDDALEKRFLDKALELNMLSLKGHRSVGGIRASLYNAVTIEDVQKLAAFMKKFLEMHQL

SEQ ID NO: 1073 - protein, 370 aa, synthetic construct
MDAPRQVVNFGPGPAKLPHSVLLEIQKELLDYKGVGISVLEMSHRSSDFAKIINNTENLVRELLAVPDNYKVIFLQGGGCGQFSAVPLNLIGLKAGRCADYVVTGAWSAKAAEEAKKFGTINIVHPKLGSYTKIPDPSTWNLNPDASYVYYCANETVHGVEFDFIPDVKGAVLVCDMSSNFLSKPVDVSKFGVIFAGAQKNVGSAGVTVVIVRDDLLGFALRECPSVLEYKVQAGNSSLYNTPPCFSIYVMGLVLEWIKNNGGAAAMEKLSSIKSQTIYEIIDNSQGFYVCPVEPQNRSKMNIPFRIGNAKGDDALEKRFLDKALELNMLSLKGHRSVGGIRASLYNAVTIEDVQKLVAFMKKFLEMHQL

SEQ ID NO: 1074 - protein, 370 aa, synthetic construct
MDAPRQVVNFGPGPAKLPHSVLLEIQKELLDYKGVGISVLEMSHRSSDFAKIINNTENLVRELLAVPDNYKVIFLQGGGCGQFSAVPLNLIGLKAGRCADYVVTGAWSAKAAEEAKKFGTINIVHPKLGSYTKIPDPSTWNLNPDASYVYYCANETVHGVEFDFIPDVKGAVLVCDMSSNFLSKPVDVSMFGVIFAGAQKNVGSAGVTVVIVRDDLLGFALRECPSVLEYKVQAGNSSLYNTPPCFSIYVMGLVLEWIKNNGGAAAMEKLSSIKSQTIYEIIDNSQGFYVCPVEPQNRSKMNIPFRIGNAKGDDALEKRFLDKALELNMLSLKGHRSVGGIRASLYNAVTIEDVQKLAAFMKKFLEMHQL

SEQ ID NO: 1075 - protein, 370 aa, synthetic construct
MDAPRQVVNFGPGPAKLPHSVLLEIQKELLDYKGVGISVLEMSHRSSDFAKIINNTENLVRELLAVPDNYKVIFLQGGGCGQFSAVPLNLIGLKAGRCADYVVTGAWSAKAAEEAKKFGTINIVHSKLGSYTKIPDPSTWNLNPDASYVYYCANETVHGVEFDFIPDVKGAVLVCDMSSNFLSKPVDVSKFGVIFAGAQKNVGSAGVTVVIVRDDLLGFALRECPSVLEYKVQAGNSSLYNTPPCFSIYVMGLVLEWIKNNGGAAAMEKLSSIKSQTIYEIIDNSQGFYVCPVEPQNRSKMNIPFRIGNAKGDDALEKRFLDKALELNMLSLKGHRSVGGIRASLYNAVTIEDVQKLAAFMKKFLEMHQL

SEQ ID NO: 1076 - protein, 370 aa, synthetic construct
MDAPRQVVNFGPGPAKLPHSVLLEIQKELLDYKGVGISVLEMSHRSSDFAKIINNTENLVRELLAVPDNYKVIFLQGGGCGQFSAVPLNLIGLKAGRCADYVVTGAWSAKAAEEAKKFGTINIVHPKLGSYTKIPDPSTWNLNPDASYVYYCANETVHGVEFDFIPDVKGAVLVCDMSSNFLSKPVDVSKFGVIFAGAQKNVGSAGVTVVIVRDDLLGFALRECPSVLEYKVQAGNSSLYNTPPCFSIYVMGLVLEWIKNNGGAAAMEKLSSIKSHTIYEIIDNSQGFYVCPVEPQNRSKMNIPFRIGNAKGDDALEKRFLDKALELNMLSLKGHRSVGGIRASLYNAVTIEDVQKLAAFMKKFLEMHQL

SEQ ID NO: 1077 - protein, 370 aa, synthetic construct
MDAPRQVVNFGPGPAKLPHSVLLEIQKELLDYKGVGISVLEMSHRSSDFAKIINNTENLVRELLAVPDNYKVIFLQGGGCGQFSAVPLNLIGLKAGRCADYVVTGAWSAKAAEEAKKFGTINIVHPKLGSYTKIPDPSTWNLNPDASYVYYCANETVHGVEFDFIPDVKGAVLVCDMSSNFLSKPVDVSKFGVIFAGAQKNVGSAGVTVVIVRDDLLGFALRECPSVLEYKVQAGNSSLYNTPPCFSIYVMGLVLEWIKNNGGAAAMEKLSSIKSQTIYEIIDNSQEFYVCPVEPQNRSKMNIPFRIGNAKGDDALEKRFLDKALELNMLSLKGHRSVGGIRASLYNAVTIEDVQKLAAFMKKFLEMHQL

SEQ ID NO: 1078 - protein, 370 aa, synthetic construct
MDSPRQVVNFGPGPAKLPHSVLLEIQKELLDYKGVGISVLEMSHRSSDFAKIINNTENLVRELLAVPDNYKVIFLQGGGCGQFSAVPLNLIGLKAGRCADYVVTGAWSAKAAEEAKKFGTINIVHPKLGSYTKIPDPSTWNLNPDASYVYYCANETVHGVEFDFIPDVKGAVLVCDMSSNFLSKPVDVSKFGVIFAGAQKNVGSAGVTVVIVRDDLLGFALRECPSVLEYKVQAGNSSLYNTPPCFSIYVMGLVLEWIKNNGGAAAMEKLSSIKSQTIYEIIDNSQGFYVCPVEPQNRSKMNIPFRIGNAKGDDALEKRFLDKALELNMLSLKGHRSVGGIRASLYNAVTIEDVQKLAAFMKKFLEMHQL

SEQ ID NO: 1079 - protein, 370 aa, synthetic construct
MDAPRQVVNFGPGPAKLPHSVLLEIQKELLDYKGVGISVLEMSHRSSDFAKIINNTENLVRELLAVPDNYKVIFLQGGGCGQFSAVPLNLIGLKAGRCADYVVTGAWSAKAAEEAKKFGTINIVHPKLGSYTKIPDPSTWNLNPDASYVYYCANETVHGVEFDFIPDVKGAVLVCDMSSNFLSKPVDVSKFGVIFAGAQKNVGSAGVTVVIVRDELLGFALRECPSVLEYKVQAGNSSLYNTPPCFSIYVMGLVLEWIKNNGGAAAMEKLSSIKSQTIYEIIDNSQGFYVCPVEPQNRSKMNIPFRIGNAKGDDALEKRFLDKALELNMLSLKGHRSVGGIRASLYNAVTIEDVQKLAAFMKKFLEMHQL

SEQ ID NO: 1080 - protein, 370 aa, synthetic construct
MDAPRQVVNFGPGPAKLPHSVLLEIQKELLDYKGVGISVLEMSHRSSDFAKIINNTENLVRELLAVPDNYKVIFLQGGGCGQFSAVPLNLIGLKAGRCADYVVTGAWSAKAAEEAKKFGTINIVHPTLGSYTKIPDPSTWNLNPDASYVYYCANETVHGVEFDFIPDVKGAVLVCDMSSNFLSKPVDVSKFGVIFAGAQKNVGSAGVTVVIVRDDLLGFALRECPSVLEYKVQAGNSSLYNTPPCFSIYVMGLVLEWIKNNGGAAAMEKLSSIKSQTIYEIIDNSQGFYVCPVEPQNRSKMNIPFRIGNAKGDDALEKRFLDKALELNMLSLKGHRSVGGIRASLYNAVTIEDVQKLAAFMKKFLEMHQL

SEQ ID NO: 1081 - protein, 370 aa, synthetic construct
MDAPRQVVNFGPGPAKLPHSVLLEIQKELLDYKGVGISVLEMSHRSSDFAKIINNTEYLVRELLAVPDNYKVIFLQGGGCGQFSAVPLNLIGLKAGRCADYVVTGAWSAKAAEEAKKFGTINIVHPKLGSYTKIPDPSTWNLNPDASYVYYCANETVHGVEFDFIPDVKGAVLVCDMSSNFLSKPVDVSKFGVIFAGAQKNVGSAGVTVVIVRDDLLGFALRECPSVLEYKVQAGNSSLYNTPPCFSIYVMGLVLEWIKNNGGAAAMEKLSSIKSQTIYEIIDNSQGFYVCPVEPQNRSKMNIPFRIGNAKGDDALEKRFLDKALELNMLSLKGHRSVGGIRASLYNAVTIEDVQKLAAFMKKFLEMHQL

SEQ ID NO: 1082 - protein, 370 aa, synthetic construct
MDAPRQVVNFGPGPAKLPHSVLLEIQKELLDYKGVGISVLEMSHRSSDFAKIINNTENLVRELLAVPDNYKVIFLQGGGCGQFSAVPLNLIGLKAGRCADYVVTGAWSAKAAEEAKKFGTINIVHPKLGSYTKIPDPSTWNLNPDASYVYYCANETVHGVEFDCIPDVKGAVLVCDMSSNFLSKPVDVSKFGVIFAGAQKNVGSAGVTVVIVRDDLLGFALRECPSVLEYKVQAGNSSLYNTPPCFSIYVMGLVLEWIKNNGGAAAMEKLSSIKSQTIYEIIDNSQGFYVCPVEPQNRSKMNIPFRIGNAKGDDALEKRFLDKALELNMLSLKGHRSVGGIRASLYNAVTIEDVQKLAAFMKKFLEMHQL

SEQ ID NO: 1083 - protein, 370 aa, synthetic construct
MDAPRQVVNFGPGPAKLPHSVLLEIQKELLDYKGVGISVLEMSHRSSDFAKIINNTENLVRELLAVPDNYKVIFLQGGGCGQFSAVPLNLIGLKAGRCADYVVTGAWSAKAAEEAKKFGTINIVHPKLGSYTKIPDPSTWNLNPDASYVYYCANETVHGVEFDFIPDVKGAVLVCDMSSNFLSKPVDVSKFGVIFAGAQKNVGSAGVTVVIVRDDLLGFALRECPSVLEYKVQAGNSSLYNTPPCFSIYVMGLVLEWIKNNGGAAAMEKLSSIKSQTIYEIIDNSQGFYVCPVEPENRSKMNIPFRIGNAKGDDALEKRFLDKALELNMLSLKGHRSVGGIRASLYNAVTIEDVQKLAAFMKKFLEMHQL

SEQ ID NO: 1084 - protein, 370 aa, synthetic construct
MDAPRQVVNFGPGPAKLPHSVLLEIQKELLDYKGVGISVLEMSHRSSDFAKIINNTENLVRELLAVPDNYKVIFLQGGGCGQFSAVPLNLIGLKAGRCADYVVTGAWSAKAAEEAKKYGTINIVHPKLGSYTKIPDPSTWNLNPDASYVYYCANETVHGVEFDFIPDVKGAVLVCDMSSNFLSKPVDVSKFGVIFAGAQKNVGSAGVTVVIVRDDLLGFALRECPSVLEYKVQAGNSSLYNTPPCFSIYVMGLVLEWIKNNGGAAAMEKLSSIKSQTIYEIIDNSQGFYVCPVEPQNRSKMNIPFRIGNAKGDDALEKRFLDKALELNMLSLKGHRSVGGIRASLYNAVTIEDVQKLAAFMKKFLEMHQL

SEQ ID NO: 1085 - protein, 370 aa, synthetic construct
MDAPRQVVNFGPGPAKLPHSVLLEIQKELLDYKGVGISVLEMSHRSSDFAKIINNTENLVRELLAVPDNYKVIFLQGGGCGQFSAVPLNLIGLKAGRCADYVVTGAWSAKAAEEAKKFGTINIVHPKLGSYTKIPDPSTWNINPDASYVYYCANETVHGVEFDFIPDVKGAVLVCDMSSNFLSKPVDVSKFGVIFAGAQKNVGSAGVTVVIVRDDLLGFALRECPSVLEYKVQAGNSSLYNTPPCFSIYVMGLVLEWIKNNGGAAAMEKLSSIKSQTIYEIIDNSQGFYVCPVEPQNRSKMNIPFRIGNAKGDDALEKRFLDKALELNMLSLKGHRSVGGIRASLYNAVTIEDVQKLAAFMKKFLEMHQL

SEQ ID NO: 1086 - protein, 370 aa, synthetic construct
MDAPRQVVNFGPGPAKLPHSVLLEIQKELLDYKGVGISVVEMSHRSSDFAKIINNTENLVRELLAVPDNYKVIFLQGGGCGQFSAVPLNLIGLKAGRCADYVVTGAWSAKAAEEAKKFGTINIVHPKLGSYTKIPDPSTWNLNPDASYVYYCANETVHGVEFDFIPDVKGAVLVCDMSSNFLSKPVDVSKFGVIFAGAQKNVGSAGVTVVIVRDDLLGFALRECPSVLEYKVQAGNSSLYNTPPCFSIYVMGLVLEWIKNNGGAAAMEKLSSIKSQTIYEIIDNSQGFYVCPVEPQNRSKMNIPFRIGNAKGDDALEKRFLDKALELNMLSLKGHRSVGGIRASLYNAVTIEDVQKLAAFMKKFLEMHQL

SEQ ID NO: 1087 - protein, 370 aa, synthetic construct
MDAPRQVVNFGPGPAKLPHSVLLEIQKELLDYKGVGISVLEMSHRSSDFAKIINNTENLVRELLAVPDNYKVIFLQGGGCGQFSAVPLNLIGLKAGRCADYVVTGAWSAKAAEEAKKFGTINIVHPKLGSYTKIPDPSTWNLNPDASYVYYCANETVHGVEFDFIPDVKGAVLVCDMSSNFLSKPVDVSKFGVIFAGAQKNVGSAGVTVVIVRDDLLAFALRECPSVLEYKVQAGNSSLYNTPPCFSIYVMGLVLEWIKNNGGAAAMEKLSSIKSQTIYEIIDNSQGFYVCPVEPQNRSKMNIPFRIGNAKGDDALEKRFLDKALELNMLSLKGHRSVGGIRASLYNAVTIEDVQKLAAFMKKFLEMHQL

SEQ ID NO: 1088 - protein, 370 aa, synthetic construct
MDAPRQVVNFGPGPAKLPHSVLLEIQKELLDYKGVGISVLEMSHRSSDFAKIINNTENLVRELLAVPDNYKVIFLQGGGCGQFSAVPLNLIGLKAVRCADYVVTGAWSAKAAEEAKKFGTINIVHPKLGSYTKIPDPSTWNLNPDASYVYYCANETVHGVEFDFIPDVKGAVLVCDMSSNFLSKPVDVSKFGVIFAGAQKNVGSAGVTVVIVRDDLLGFALRECPSVLEYKVQAGNSSLYNTPPCFSIYVMGLVLEWIKNNGGAAAMEKLSSIKSQTIYEIIDNSQGFYVCPVEPQNRSKMNIPFRIGNAKGDDALEKRFLDKALELNMLSLKGHRSVGGIRASLYNAVTIEDVQKLAAFMKKFLEMHQL

SEQ ID NO: 1089 - protein, 370 aa, synthetic construct
MDAPRQVVNFGPGPAKLPHSVLLEIQKELLDYKGVGISVLEMSHRSSDFAKIINNTENLVRELLAVPDNYKVIFLQGGGCGQFSAVPLNLIGLKAGRCADYVVTGAWSAKAAEEAKKFGTINIVHPKLGSYTKIPDPSTWNLNPDASYVYYCANETVHGVEFDFIPDVKGAVLVCDMSSNFLSKPVDVSKFGVIFAGAQKNVGSAGVTVVIVRDDLLGFALRECPSVLEYKVQAGNSSLYNTPPCFSIYVMGLVLEWIKNNGGAAAVEKLSSIKSQTIYEIIDNSQGFYVCPVEPQNRSKMNIPFRIGNAKGDDALEKRFLDKALELNMLSLKGHRSVGGIRASLYNAVTIEDVQKLAAFMKKFLEMHQL

SEQ ID NO: 1090 - protein, 370 aa, synthetic construct
MDAPRQVVNFGPGPAKLPHSVLLEIQKELLDYKGVGISVLEMSHRSSDFAKIINNTENLVRELLAVPDNYKVIFLQGGGCGQFSAVPLNLIGLKAGRCADYVVTGAWSAKAAEEAKKFGTINIVHPKLGSYTKIPDPSTWNLNPDASYVYYCANETVHGVEFDFIPDVKGAVLVCDMSSNFLSKPVDVSKFGVIFAGAQKNVGSAGVTVVIVRDDLLGFALRECPSVLEYKVQAGNSSLYNTPPCFSIYVMGLVLEWIKNNGGAAAMEKLSSIKSQTIYEIIDDSQGFYVCPVEPQNRSKMNIPFRIGNAKGDDALEKRFLDKALELNMLSLKGHRSVGGIRASLYNAVTIEDVQKLAAFMKKFLEMHQL

SEQ ID NO: 1091 - protein, 370 aa, synthetic construct
MDAPRQVVNFGPGPAKLPHSVLLEIQKELLDYKGVGISVLEMSHRSSDFAKIINNTENLVRELLAVPDNYKVIFLQGGGCGQFSAVPINLIGLKAGRCADYVVTGAWSAKAAEEAKKFGTINIVHPKLGSYTKIPDPSTWNLNPDASYVYYCANETVHGVEFDFIPDVKGAVLVCDMSSNFLSKPVDVSKFGVIFAGAQKNVGSAGVTVVIVRDDLLGFALRECPSVLEYKVQAGNSSLYNTPPCFSIYVMGLVLEWIKNNGGAAAMEKLSSIKSQTIYEIIDNSQGFYVCPVEPQNRSKMNIPFRIGNAKGDDALEKRFLDKALELNMLSLKGHRSVGGIRASLYNAVTIEDVQKLAAFMKKFLEMHQL

SEQ ID NO: 1092 - protein, 370 aa, synthetic construct
MDAPRQVVNFGPGPAKLPHSVLLEIQKELLDYKGVGISVLEMSHRSSDFAKIINNTENLVRELLAVPDNYKVIFLQGGGCGQFSAVPLNLIGLKAGRCADYVVTGAWSAKAAEEAKKFGTINIVHPKLGSYTKIPDPSTWNLNPDASYVYYCANETVHGVEFDFIPHVKGAVLVCDMSSNFLSKPVDVSKFGVIFAGAQKNVGSAGVTVVIVRDDLLGFALRECPSVLEYKVQAGNSSLYNTPPCFSIYVMGLVLEWIKNNGGAAAMEKLSSIKSQTIYEIIDNSQGFYVCPVEPQNRSKMNIPFRIGNAKGDDALEKRFLDKALELNMLSLKGHRSVGGIRASLYNAVTIEDVQKLAAFMKKFLEMHQL

SEQ ID NO: 1093 - protein, 370 aa, synthetic construct
MDAPRQVDNFGPGPAKLPHSVLLEIQKELLDYKGVGISVLEMSHRSSDFAKIINNTENLVRELLAVPDNYKVIFLQGGGCGQFSAVPLNLIGLKAGRCADYVVTGAWSAKAAEEAKKFGTINIVHPKLGSYTKIPDPSTWNLNPDASYVYYCANETVHGVEFDFIPDVKGAVLVCDMSSNFLSKPVDVSKFGVIFAGAQKNVGSAGVTVVIVRDDLLGFALRECPSVLEYKVQAGNSSLYNTPPCFSIYVMGLVLEWIKNNGGAAAMEKLSSIKSQTIYEIIDNSQGFYVCPVEPQNRSKMNIPFRIGNAKGDDALEKRFLDKALELNMLSLKGHRSVGGIRASLYNAVTIEDVQKLAAFMKKFLEMHQL

SEQ ID NO: 1094 - protein, 370 aa, synthetic construct
MDAPRQVVNFGPGPAKLPHSVLLEIQKELLDYKGVGISVLEMSHRSSDFAKIINNTENLVRELLAVPDNYKVIFLQGGGCGQFSAVPLNLIGLKAGRCADYVVTGAWSAKAAEEAKKFGTINIVHPKLGSYTKIPDPSTWNLNPDASYVYYCANETVHGVEFDFIPDVKGAVLVCDMSSNFLSKLVDVSKFGVIFAGAQKNVGSAGVTVVIVRDDLLGFALRECPSVLEYKVQAGNSSLYNTPPCFSIYVMGLVLEWIKNNGGAAAMEKLSSIKSQTIYEIIDNSQGFYVCPVEPQNRSKMNIPFRIGNAKGDDALEKRFLDKALELNMLSLKGHRSVGGIRASLYNAVTIEDVQKLAAFMKKFLEMHQL

SEQ ID NO: 1095 - protein, 370 aa, synthetic construct
MDAPRQVVNFGPGPAKLPHSVLLEIQKELLDYKGVGISVLEMSHRSSDFAKIINNTENLVRELLAVPDNYKVIFLQGGGCGQFSAVPLNLIGLKAGRCADYVVTGAWSAKAAEEAKKFGTINIVHPKLGSYTKIPDPSTWNLNPDASYVYYCANETVHGVEFDFIPDVKGAVLVCDMSSNFLSKPVDVSKFGVIFAGAQKNVGSAGVTVVIVRDDLLGFALRECPSVLEYKVQAGNSSLYNTPACFSIYVMGLVLEWIKNNGGAAAMEKLSSIKSQTIYEIIDNSQGFYVCPVEPQNRSKMNIPFRIGNAKGDDALEKRFLDKALELNMLSLKGHRSVGGIRASLYNAVTIEDVQKLAAFMKKFLEMHQL

SEQ ID NO: 1096 - protein, 370 aa, synthetic construct
MDAPRQVVNFGPGPAKLPHSVLLEIQKELLDYKGVGISVLEMSHRSSDFAKIINNTENLVRELLAVPDNYKVIFLQGGGCGQFSAVPLNLIGLKAGRCADYVVTGAWSAKAAEEAKKFGTINIVHPKLGSYTKIPDPSTWNLNPDASYVYYCANETVHGVEFDFIPDVKGAVLVCDMSSNFLSKPVDVSKFGVIFAGAQKNVGSAGVTVVIVRDDLLGFALRECPSVLEYKVQAGNSSLYNTPPCFSIYVMGLVLEWIKNNGGAAAMEKLSSIKSQSIYEIIDNSQGFYVCPVEPQNRSKMNIPFRIGNAKGDDALEKRFLDKALELNMLSLKGHRSVGGIRASLYNAVTIEDVQKLAAFMKKFLEMHQL

SEQ ID NO: 1097 - protein, 370 aa, synthetic construct
MDAPRQVVNFGPGPAKLPHSVLLEIQKELLDYKGVGISVLEMSHRSSDFAKIINNTENLVRELLAVPDNYKVIFLQGGGCGQFSAVPLNLIGLKAGRCADYVVTGAWSAKAAEEAKKFGTINIVHPKLGSYTKIPDPSTWNLNPDASYVYYCANETVHGVEFDFIPDVKGAVLVCDMSSNFLSKPVDVSKFGVIFAGAQKNVGSAGVTVVIVRDDLLGFALRECPSVLEYKVQAGNSSLYNTPPCFSIYVMGLVLEWIKNNGGAAAMEKLSSIKSQTIYEIIDNSQGFYVCPVEPQNRSKMNIPFRIGNVKGDDALEKRFLDKALELNMLSLKGHRSVGGIRASLYNAVTIEDVQKLAAFMKKFLEMHQL

SEQ ID NO: 1098 - protein, 370 aa, synthetic construct
MDAPKQVVNFGPGPAKLPHSVLLEIQKELLDYKGVGISVLEMSHRSSDFAKIINNTENLVRELLAVPDNYKVIFLQGGGCGQFSAVPLNLIGLKAGRCADYVVTGAWSAKAAEEAKKFGTINIVHPKLGSYTKIPDPSTWNLNPDASYVYYCANETVHGVEFDFIPDVKGAVLVCDMSSNFLSKPVDVSKFGVIFAGAQKNVGSAGVTVVIVRDDLLGFALRECPSVLEYKVQAGNSSLYNTPPCFSIYVMGLVLEWIKNNGGAAAMEKLSSIKSQTIYEIIDNSQGFYVCPVEPQNRSKMNIPFRIGNAKGDDALEKRFLDKALELNMLSLKGHRSVGGIRASLYNAVTIEDVQKLAAFMKKFLEMHQL

SEQ ID NO: 1099 - protein, 370 aa, synthetic construct
MDAPRQVVNFGPGPAKLPHSVLLEIQKELLDYKGVGISVLEMSHRSSDFAKIINNTENLVRELLAVPDNYKVIFLQGGGCGQFSAVPLNLIGLKAGRCADYVVTGAWSAKAAEEAKKFGTINIVHPKLGSYTKIPDPSTWNLNPDASYVYYCANETVHGVEFDFIPDVKGAVLVCDMSSNFLSKPVDVSKFGVIFAGAQKNVGSAGVTVVIVRDDLLGFALRECPSVLEYKVQAGNSSLYNTPPCFSIYVMGLVLEWIKNNGGAAAMEKLSSIKSQTIYEIIDNSQGFYVCPVEPQNRSKMNIPFRIGNAKGDDALEKRFLDKALELNMMSLKGHRSVGGIRASLYNAVTIEDVQKLAAFMKKFLEMHQL

SEQ ID NO: 1100 - protein, 370 aa, synthetic construct
MDAPRQVVNFGPGPAKLPHSVLLEIQKELLDYKGVGISVLEMSHRSSDFAKIINNTENLVRELLAVPDNYKVIFLQGGGCGQFSAVPLNLIGLKAGRCADYVVTGAWSAKAAEEAKKFGTINIVHPKLGSYTKIPDPSTWNLNPDASYVYYCANETVHGVEFDLIPDVKGAVLVCDMSSNFLSKPVDVSKFGVIFAGAQKNVGSAGVTVVIVRDDLLGFALRECPSVLEYKVQAGNSSLYNTPPCFSIYVMGLVLEWIKNNGGAAAMEKLSSIKSQTIYEIIDNSQGFYVCPVEPQNRSKMNIPFRIGNAKGDDALEKRFLDKALELNMLSLKGHRSVGGIRASLYNAVTIEDVQKLAAFMKKFLEMHQL

SEQ ID NO: 1101 - protein, 370 aa, synthetic construct
MDAPRQVVNFGPGPAKLPHSVLLEIQKELLDYKGVGISVLEMSHRSSDFAKIINNTENLVRELLAVPDNYKVIFLQGGGCGQFSAVPLNLIGLKAGRCADYVVTGAWSAKAAEEAKKFGTINIVHPKLGSYTKIPDPSTWNLNPDASYVYYCANETVHGVEFDFIPDVKGAVLVCDMSSNFLSKPVDVSKFGVIFAGAQKNVGSAGVTVVIVRDDLPGFALRECPSVLEYKVQAGNSSLYNTPPCFSIYVMGLVLEWIKNNGGAAAMEKLSSIKSQTIYEIIDNSQGFYVCPVEPQNRSKMNIPFRIGNAKGDDALEKRFLDKALELNMLSLKGHRSVGGIRASLYNAVTIEDVQKLAAFMKKFLEMHQL

SEQ ID NO: 1102 - protein, 370 aa, synthetic construct
MDAPRQVVNFGPGPAKLPHSVLLEIQKELLDYKGVGISVLEMSHRSSDFAKIINNTENLVRELLAVPDNYKVIFLQGGGCGQFSAVPLNLIGLKAGRCADYVVTGAWSAKAAEEAKKFGTINIVHPKLGSYTKIPDPSTWNLNPDASYVYYCANETVHGVEFDFIPDVKGAVLVCDMSSNFLSKPVDVSKFGVIFAGAQKNVGSAGVTVVIVRDDLLGFALRECPSVLEYKVQAGNSSLYNTPPCFSIYVMGLVLEWIKNNGGAAAMEKLSSIKSQTIYEIIDNSQGFYVCPVEPQNRSKMNIPFRIGNAKGDDALEKRFLDKALELNMLSLKGHRSVGGIRPSLYNAVTIEDVQKLAAFMKKFLEMHQL

SEQ ID NO: 1103 - protein, 370 aa, synthetic construct
MDAPRQVVNFGPGPAKLPHSVLLEIQKELLDYKGVGISVLEMSHRSSDFAKIINNTENLVRELLAVPDNYKVIFLQGGGCGQFSAVPLNLIGLKAGRCADYVVTGAWSAKAAEEAKKFGTINIVHPKLGSYTKIPDPSTWSLNPDASYVYYCANETVHGVEFDFIPDVKGAVLVCDMSSNFLSKPVDVSKFGVIFAGAQKNVGSAGVTVVIVRDDLLGFALRECPSVLEYKVQAGNSSLYNTPPCFSIYVMGLVLEWIKNNGGAAAMEKLSSIKSQTIYEIIDNSQGFYVCPVEPQNRSKMNIPFRIGNAKGDDALEKRFLDKALELNMLSLKGHRSVGGIRASLYNAVTIEDVQKLAAFMKKFLEMHQL

SEQ ID NO: 1104 - protein, 370 aa, synthetic construct
MDAPRQVVNFGPGPAKLPHSVLLEIQKELLDYKGVGISVLEMSHRSSDFAKIINNTEHLVRELLAVPDNYKVIFLQGGGCGQFSAVPLNLIGLKAGRCADYVVTGAWSAKAAEEAKKFGTINIVHPKLGSYTKIPDPSTWNLNPDASYVYYCANETVHGVEFDFIPDVKGAVLVCDMSSNFLSKPVDVSKFGVIFAGAQKNVGSAGVTVVIVRDDLLGFALRECPSVLEYKVQAGNSSLYNTPPCFSIYVMGLVLEWIKNNGGAAAMEKLSSIKSQTIYEIIDNSQGFYVCPVEPQNRSKMNIPFRIGNAKGDDALEKRFLDKALELNMLSLKGHRSVGGIRASLYNAVTIEDVQKLAAFMKKFLEMHQL

SEQ ID NO: 1105 - protein, 370 aa, synthetic construct
MDAPRQVVNFGPGPAKLPHSVLLEIQKELLVYKGVGISVLEMSHRSSDFAKIINNTENLVRELLAVPDNYKVIFLQGGGCGQFSAVPLNLIGLKAGRCADYVVTGAWSAKAAEEAKKFGTINIVHPKLGSYTKIPDPSTWNLNPDASYVYYCANETVHGVEFDFIPDVKGAVLVCDMSSNFLSKPVDVSKFGVIFAGAQKNVGSAGVTVVIVRDDLLGFALRECPSVLEYKVQAGNSSLYNTPPCFSIYVMGLVLEWIKNNGGAAAMEKLSSIKSQTIYEIIDNSQGFYVCPVEPQNRSKMNIPFRIGNAKGDDALEKRFLDKALELNMLSLKGHRSVGGIRASLYNAVTIEDVQKLAAFMKKFLEMHQL

SEQ ID NO: 1106 - protein, 370 aa, synthetic construct
MDAPRQVVNFGPGPAKLPHSVLLEIQKELLDYKGVGISVLEMSHRSSDFAKIINNTENLVRELLAVPDNYKVIFLQGGGCGQFSAVPLNLIGLKAGRCADYVVTGAWSAKAAEEAKKFGTINIVHPKLGSYTKIPDPSTWNLNPDASYVYYCANETVHGVEFDFIPDVKGAVLVCDMSSNFLSKPVDVSKFGVIFAGAQKNVGSAGVTVVIVRDDLLGFALRECPSVLEYKVQAGNSSLYNTPPCFSIYVMGLVLEWIKNNGGAAAMEKLSSIKSQTIYEIIDNSQGFYVCPVEPQNRSKMNIPFRIGNAKEDDALEKRFLDKALELNMLSLKGHRSVGGIRASLYNAVTIEDVQKLAAFMKKFLEMHQL

SEQ ID NO: 1107 - protein, 370 aa, synthetic construct
MDAPRQVVNFGPGPAKLPHSVLLEIQKELLDYKGVGISVLEMSHRSSDFAKIINNTENLVRELLAVPDNYKVIFLQGGGCGQFSAVPLNLIGLKAGRCADYVVTGAWSAKAAEEAKKFGTINIVHPKLGSYTKIPDPSTWNLNPDASYVYYCANETVHGVEFDFIPDVKGAVLVCDMSSNFLSKPVDVSKFGVIFAGAQKNVGSAGVTVVIVRDDLLGFALRECPSVLEYKVQAGNSSLYNTPPCFSIYVMGLVLEWIKNNGGAAAMEKFSSIKSQTIYEIIDNSQGFYVCPVEPQNRSKMNIPFRIGNAKGDDALEKRFLDKALELNMLSLKGHRSVGGIRASLYNAVTIEDVQKLAAFMKKFLEMHQL

SEQ ID NO: 1108 - protein, 370 aa, synthetic construct
MDAPRQVVNFGPGPAKLPHSVLLEIQKELLDYKGVGISVLEMSHRSSDFAKIINNTENLVRELLAVPDNYKVIFLQGGGCGQFSAVPLNLIGLKAGRCADYVVTGAWSAKAAEEAKKFGTINIVHPKLGSYTKIPDPSTWNLNPDASYVYYCANETVHGVEFDFIPDVKGAVLVCDMSSNFLSKPVDVSKFGVIFAGAQKNVGSAGVTVVIVRDDLLGFALRECPSVLEYKVQAGNCSLYNTPPCFSIYVMGLVLEWIKNNGGAAAMEKLSSIKSQTIYEIIDNSQGFYVCPVEPQNRSKMNIPFRIGNAKGDDALEKRFLDKALELNMLSLKGHRSVGGIRASLYNAVTIEDVQKLAAFMKKFLEMHQL

SEQ ID NO: 1109 - protein, 370 aa, synthetic construct
MDAPRQVVNFGPGPAKLPHSVLLEIQKELLDYKGVGISVLEMSHRSSDFAKIINNTENLVRELLAVPDNYKVIFLQGGGCGQFSAVPLNLIGLKAGRCADYVVTGAWSAKAAEEAKKFGTINIVHPKLGSYTKIPDPSTWNLNPDASYVYYCANETVHGVEFDFIPDVKGAVLVCDMSSNFLSKPVDVSKFGVIFAGAQKNVGSAGVTVVIVRDDLLGFALRECPSVLEYKVQAGNSSLYNTPPCFSIYVMGLVLEWIKNNGGAAAMGKLSSIKSQTIYEIIDNSQGFYVCPVEPQNRSKMNIPFRIGNAKGDDALEKRFLDKALELNMLSLKGHRSVGGIRASLYNAVTIEDVQKLAAFMKKFLEMHQL

SEQ ID NO: 1110 - protein, 370 aa, synthetic construct
MDAPRQVVNFGPGPAKLPHSVLLEIQKELLDYKGVGISVLEMSHRSSDFAKIINNTENLVRELLAVPDNYKVIFLQGGGCGQFSAVPLNLIGLKAGRCADYVVTGAWSAKAAEEAKKFGTINIVHPKLGSYTKIPDPSTWNLNPDASYVYYCANETVHGVEFDFIPDVKGAVLVCDMSSNFLSKPVDVSKFGVIFAGAQKNVGSAGVTVVIVRDDLLGFALRECPSVLEYKVQAGNSSLYNTPPCFSIYVMGLVLEWIKNNGGAAAMEKLSSIKSQTIYEIIDNSQGFYVCPVEPQNRSKMNIPFRIGNAKGDDALEKRFLDKSLELNMLSLKGHRSVGGIRASLYNAVTIEDVQKLAAFMKKFLEMHQL

SEQ ID NO: 1111 - protein, 370 aa, synthetic construct
MDAPRQVVNFGPGPAKLPHSVLLEIQKELLDYKGVGISVLEMSHRSSDFAKIINNTENLVRELLAVPDNYKVIVLQGGGCGQFSAVPLNLIGLKAGRCADYVVTGAWSAKAAEEAKKFGTINIVHPKLGSYTKIPDPSTWNLNPDASYVYYCANETVHGVEFDFIPDVKGAVLVCDMSSNFLSKPVDVSKFGVIFAGAQKNVGSAGVTVVIVRDDLLGFALRECPSVLEYKVQAGNSSLYNTPPCFSIYVMGLVLEWIKNNGGAAAMEKLSSIKSQTIYEIIDNSQGFYVCPVEPQNRSKMNIPFRIGNAKGDDALEKRFLDKALELNMLSLKGHRSVGGIRASLYNAVTIEDVQKLAAFMKKFLEMHQL

SEQ ID NO: 1112 - protein, 370 aa, synthetic construct
MDAPRQVVNFGPGPAKLPHSVLLEIQKELLDYKGVGISVLEMSHRSSDFAKIINNTENLVRELLAVPDNYKVIFLQGGGCGQFSAVPLNLIGLKAGRCADYVVTGAWSAKAAEEAKKFGTINIVHPKLGSYTKIPDPSTWNLNPDASYVYYCANETVHGVEFDFIPDVKGAVLVCDMSSNFLSKPVDVSKFGVIFAGAQKNVGSAGVTVVIVRDDLLGFALRECPSVLEYKVQAGNSSLYNTPPCFSIYVMGLVLEWIKNNGGAAAMEKLSSIKSQTIYEIIDNSQGFYVCPVEPQNRSKMNIPFRIGNAKGDYALEKRFLDKALELNMLSLKGHRSVGGIRASLYNAVTIEDVQKLAAFMKKFLEMHQL

SEQ ID NO: 1113 - protein, 370 aa, synthetic construct
MVAPRQVVNFGPGPAKLPHSVLLEIQKELLDYKGVGISVLEMSHRSSDFAKIINNTENLVRELLAVPDNYKVIFLQGGGCGQFSAVPLNLIGLKAGRCADYVVTGAWSAKAAEEAKKFGTINIVHPKLGSYTKIPDPSTWNLNPDASYVYYCANETVHGVEFDFIPDVKGAVLVCDMSSNFLSKPVDVSKFGVIFAGAQKNVGSAGVTVVIVRDDLLGFALRECPSVLEYKVQAGNSSLYNTPPCFSIYVMGLVLEWIKNNGGAAAMEKLSSIKSQTIYEIIDNSQGFYVCPVEPQNRSKMNIPFRIGNAKGDDALEKRFLDKALELNMLSLKGHRSVGGIRASLYNAVTIEDVQKLAAFMKKFLEMHQL

SEQ ID NO: 1114 - protein, 370 aa, synthetic construct
MDAPRQVVNFGPGPAKLPHSVLLEIQKELLDYKGVGISVLEMSHRSSDFAKIINNTENLVRELLAVPDNYKVIFLQGGGCGQFSAVPLNLIGLKAGRCADYVVTGAWSAKAAEEAKKFGTINIVHPKLGSYTKIPDPSTWNLNPDASYVYYCANETVHGVEFDFIPDVKGAVLVCDMSSNFLSKPVDVSKFGVIFAGAQKNVGSAGVTVVIVRDDLLGFALRECPSVLEYKVQAGNSSLYNTPPCFSIYVMGLVLEWIKNNGGAAAMEKLSSIKSQTIYEIIDNSQGFYVCPVEPQNRSKMNIPFRIGNAKGDDALEKRFLDKALELNMLSLKGHRSVGGIRASLYNAVTIEDVQKLAAFMKKFLEMHQI

SEQ ID NO: 1115 - protein, 370 aa, synthetic construct
MDAPRQVVNFGPGPAKLPHSVLLEIQKELLDYKGVGISVLEMSHRSSDFAKIINSTENLVRELLAVPDNYKVIFLQGGGCGQFSAVPLNLIGLKAGRCADYVVTGAWSAKAAEEAKKFGTINIVHPKLGSYTKIPDPSTWNLNPDASYVYYCANETVHGVEFDFIPDVKGAVLVCDMSSNFLSKPVDVSKFGVIFAGAQKNVGSAGVTVVIVRDDLLGFALRECPSVLEYKVQAGNSSLYNTPPCFSIYVMGLVLEWIKNNGGAAAMEKLSSIKSQTIYEIIDNSQGFYVCPVEPQNRSKMNIPFRIGNAKGDDALEKRFLDKALELNMLSLKGHRSVGGIRASLYNAVTIEDVQKLAAFMKKFLEMHQL

SEQ ID NO: 1116 - protein, 370 aa, synthetic construct
MDAPRQVVNFGPGPAKLPHSVLLELQKELLDYKGVGISVLEMSHRSSDFAKIINNTENLVRELLAVPDNYKVIFLQGGGCGQFSAVPLNLIGLKAGRCADYVVTGAWSAKAAEEAKKFGTINIVHPKLGSYTKIPDPSTWNLNPDASYVYYCANETVHGVEFDFIPDVKGAVLVCDMSSNFLSKPVDVSKFGVIFAGAQKNVGSAGVTVVIVRDDLLGFALRECPSVLEYKVQAGNSSLYNTPPCFSIYVMGLVLEWIKNNGGAAAMEKLSSIKSQTIYEIIDNSQGFYVCPVEPQNRSKMNIPFRIGNAKGDDALEKRFLDKALELNMLSLKGHRSVGGIRASLYNAVTIEDVQKLAAFMKKFLEMHQL

SEQ ID NO: 1117 - protein, 370 aa, synthetic construct
MDAPRQVVNFGPGPAKLPHSVLLEIQKELLDYKGVGISVLEMSHRSSDFAKIINNTENLVRELLAVPDNYKVIFLQGGGCGQFSAVPLNLIGLKAGRCADYVVTGAWSAKAAEEAKKFGTINIVHPKLGSYTKIPDPSTWNLNPDASYVYYCANETVHGVEFDFIPDVKGAVLVCDMSSNFLSKPVDVSKFGVIFAGAQKNVGSAGVTVVIVRDDLLGFALRECPSVLEYKVQAGNSSLYNTPPCFSIYVMGLVLEWIKNNGGAAAMEKLSSIKSQTIYEIIDNSQGFYVCPVEPQNRSKMNIPFRIGNAKGDDALEKRFLDKALELNMLSLKGHRSVGGIRASLYNAVTIEDVQKLAAFMKKFLDMHQL

SEQ ID NO: 1118 - protein, 370 aa, synthetic construct
MDAPRQVVNFGPGPAKLPHSVLLEIQKELLDYKGVGISVLEMSHRSSDFAKIINNTENLVRELLAVPDNYKVIFLQGGGCGQFSAVPLNLIGLKAGRCADYVVTGAWSAKAAEEAKKFGTINIVHPKLGSYTKIPDPSTWNLNPDASYVYYCANETVHGVEFDFIPDVKGAVLVCDMSSNFLSKPVDVSKFGVIFAGAQKNVGSAGVTVVIVRDDLLGFALRECPSVLEYKVQAGNSSLYNTPPCFSIYVMGLVLEWIKNNGGAAAMEKLSSIKSQTIYEIIDNSQGFYVCPVEPQNRSKMNIPFRIGNAKGDDALEKRFLDKALELNMLSLKGHRSVGGIRASPYNAVTIEDVQKLAAFMKKFLEMHQL

SEQ ID NO: 1119 - protein, 370 aa, synthetic construct
MDAPRQVVNFGPGPAKLPHSVLLEIQKELLDYKGVGISVLEMSHRSSDFAKIINNTENLVRELLAVPDNYKVIFLQGGGCGQFSAVPLNLIGLKAGRCADYVVTGAWSAKAAEEAKKFGTINIVHPKLGSYTKIPDPSTWNLNPDASYVYYCANETVHGVEFDFIPDVKGAVLVCDMSSNFLSKPVDVSKFGVIFAGAQKNVGSAGVTVVIVRDDLLGFALRECPSVLEYKVQAGNSSLYNTPPCFSIYVMGLVLEWIKNNGGAPAMEKLSSIKSQTIYEIIDNSQGFYVCPVEPQNRSKMNIPFRIGNAKGDDALEKRFLDKALELNMLSLKGHRSVGGIRASLYNAVTIEDVQKLAAFMKKFLEMHQL

SEQ ID NO: 1120 - protein, 370 aa, synthetic construct
MDAPRQVVNFGPGPAKVPHSVLLEIQKELLDYKGVGISVLEMSHRSSDFAKIINNTENLVRELLAVPDNYKVIFLQGGGCGQFSAVPLNLIGLKAGRCADYVVTGAWSAKAAEEAKKFGTINIVHPKLGSYTKIPDPSTWNLNPDASYVYYCANETVHGVEFDFIPDVKGAVLVCDMSSNFLSKPVDVSKFGVIFAGAQKNVGSAGVTVVIVRDDLLGFALRECPSVLEYKVQAGNSSLYNTPPCFSIYVMGLVLEWIKNNGGAAAMEKLSSIKSQTIYEIIDNSQGFYVCPVEPQNRSKMNIPFRIGNAKGDDALEKRFLDKALELNMLSLKGHRSVGGIRASLYNAVTIEDVQKLAAFMKKFLEMHQL

SEQ ID NO: 1121 - protein, 370 aa, synthetic construct
MDAPRQVVNFGPGPAKLPHSVLLEIQKELLDYKGVGISVLEMSHRSSDFAKIINNTENLVRELLAVPDNYKVIFLQGGGCGQFSAVPLNLIGLKAGRCADYVVTGAWSAKAAEEAKKFGTINIVHPKLGSYTKIPDPSTWNLNPDASYVYYCANETVHGVEFDFIPDVKGAVLVCDMSSNFLSKPVDVSKFGVIFAGAQKNVGSAGVTVVIVRDDLLGFALRECPSVLEYKVQAGNSSLYNTPPCFSIYVMGLVLEWIKNNGGAAAMEKLSSIKSQTIYEIIDNSQGFYVCPVEPQNRSKMNIPFRIGNAKGDDPLEKRFLDKALELNMLSLKGHRSVGGIRASLYNAVTIEDVQKLAAFMKKFLEMHQL

SEQ ID NO: 1122 - protein, 370 aa, synthetic construct
MDAPRQVVNFGPGPAKLPHSVLLEIQKELLDYKGVGISVLEMSHRSSDFAKIINNTENLVRELLAVPDNYKVIFLQGGGCGQFSAVPLNLIGLKAGRCADYVVTGAWSAKAAEEAKKFGTINIVHPKLGSYTKIPDPSTWNLNPDASYVYYCANETVHGVEFDFIPDVKGAVLVCDMSSNFLSKPVDVSKFGVIFAGAQKNVGSAGVTVVIVRDDLLGFALRECPSVLEYKVQAGNSSLYNTPPCFSIYVMGLVLEWIKNNGGAAAMEKLSSIKSQTIYEIIDNSQGFYVCPVEPQNRSKMNIPFRIGNAKGDDALEKRFLDKALELNMLSLRGHRSVGGIRASLYNAVTIEDVQKLAAFMKKFLEMHQL

SEQ ID NO: 1123 - protein, 370 aa, synthetic construct
MDAPRQVVNFGPGPAKLPHSVLLEIQKELLDYKGVGISVLEMSHRSSDFAKIINNTENLVRELLAVPDNYKVIFLQGGGCGQFSAVPLNLIGLKAGRCADYVVTGAWSAKAAEEAKKFGTINIVHPKLGSYTKIPDPSTWNLNPDASYVYYCANETVHGVEFDFIPDVKGAVLVCDMSSNFLSKPVDVSKFGVIFAGAQKNVGSAGVTVVIVRDDLLGFALRECPSVLEYKVQAGNSSLYNTPPCFSIYVMGLVLEWIKNNGGAAAMEKLSSIKSQTIYEIIDNSQGFYVCPVEPQNRSKMNIPFRIGNAKGDDALEKRFLDKALELNMLSLKGHRSVGGIRASLYNAVTIEDVQKLAAFMKEFLEMHQL

SEQ ID NO: 1124 - protein, 370 aa, synthetic construct
MDAPRQVVNFGPGPAKLPHSVLLEIQKELLDYKGVGISVLEMSHRSSDFAKIINNTENLVRELLAVPDNYKVIFLQGGGCGQFSAVPLNLIGLKAGRCADYVVTGAWSAKAAEEAKKFGTINIVHPKLGSYTKIPDPSTWNLNPDASYVYYCANETVHGVEFDFIPDVKGAVLVCDMSSNFLSKPVDVSKFGVIFAGAQKNVGSAGVTVVIVRDDLLGFALRECPSVLEYKVQAGNSSLYNTPPCFSIYVMGLLLEWIKNNGGAAAMEKLSSIKSQTIYEIIDNSQGFYVCPVEPQNRSKMNIPFRIGNAKGDDALEKRFLDKALELNMLSLKGHRSVGGIRASLYNAVTIEDVQKLAAFMKKFLEMHQL

SEQ ID NO: 1125 - protein, 370 aa, synthetic construct
MDAPRQVVNFGPGPAKLPHSVLLEIQKELLDYKGVGISVLEMSHRSSDFAKIINNTENLVRELLAVPDNYKVIFLQGGGCGQFSAVPLNLIGLKAGRCADYVVTGAWSAKAAEEAKKFGTINIVHPKLGSYTKIPDPSTWNLNPDASYVYYCANETVHGVEFDFIPDVKGAVLVCDMSSNFLSKPVDVSKFGVIFAGAQKNVGSAGVTVVIVRDDLLGFALRECPSVLEYKVQAGNSSLYNTPPCFSIYVMGLVLEWIKNNGGAAAMEKLSSIKSQTIYEIIDNSQGFYVCPVEPQNRSKMNIPFRIGNAKGDDALEKRFLDKALELNMLSLKGHRSVGGIRASLYNAVTIEDVQKLAAFMKKFLEMHPL

SEQ ID NO: 1126 - protein, 370 aa, synthetic construct
MDAPRQVVNFGPGPAKLPHSVLLEIQKELLDYKGVGISVLEMSHRSSDFAKIINNTENLVRELLAVPDNYKVIFLQGGGCGQFSAAPLNLIGLKAGRCADYVVTGAWSAKAAEEAKKFGTINIVHPKLGSYTKIPDPSTWNLNPDASYVYYCANETVHGVEFDFIPDVKGAVLVCDMSSNFLSKPVDVSKFGVIFAGAQKNVGSAGVTVVIVRDDLLGFALRECPSVLEYKVQAGNSSLYNTPPCFSIYVMGLVLEWIKNNGGAAAMEKLSSIKSQTIYEIIDNSQGFYVCPVEPQNRSKMNIPFRIGNAKGDDALEKRFLDKALELNMLSLKGHRSVGGIRASLYNAVTIEDVQKLAAFMKKFLEMHQL

SEQ ID NO: 1127 - protein, 370 aa, synthetic construct
MDAPRQVVNFGPGPAKLPHSVLLEIQKELLDYKGVGISVLEMSHRSSDFAKIINNTENLVRELLAVPDNYKVIFLQGGGCGQFSAVPLNLIGLKAGRCADYVVTGAWSAKAAEEAKKFGIINIVHPKLGSYTKIPDPSTWNLNPDASYVYYCANETVHGVEFDFIPDVKGAVLVCDMSSNFLSKPVDVSKFGVIFAGAQKNVGSAGVTVVIVRDDLLGFALRECPSVLEYKVQAGNSSLYNTPPCFSIYVMGLVLEWIKNNGGAAAMEKLSSIKSQTIYEIIDNSQGFYVCPVEPQNRSKMNIPFRIGNAKGDDALEKRFLDKALELNMLSLKGHRSVGGIRASLYNAVTIEDVQKLAAFMKKFLEMHQL

SEQ ID NO: 1128 - protein, 370 aa, synthetic construct
MDAPRQVVNFGPGPAKLPHSVLLEIQKELLDYKGVGISVLEMSHRSSDFAKIINNTENLVRELLAVPDNYKVIFLQGGGCGQFSAVPLNLIGLKAGRCADYVVTGAWSAKAAEEAKKFGTINIVHPKLGSYTKIPDPSTWNLNPDASYVYYCANETVHGVEFDFIPDVKGAVLVCDMSSNFLSKPVDVSKFGVIFAGAQKNVGSAGVTVVIVRDDLLGFALRECPSVLEYKVQAGNSSLYNTPPCFSIYVMGLALEWIKNNGGAAAMEKLSSIKSQTIYEIIDNSQGFYVCPVEPQNRSKMNIPFRIGNAKGDDALEKRFLDKALELNMLSLKGHRSVGGIRASLYNAVTIEDVQKLAAFMKKFLEMHQL

SEQ ID NO: 1129 - protein, 370 aa, synthetic construct
MDAPRQVVNFGPGPAKLPHSVLLEIQKELLDYKGVGISVLEMSHRSSVFAKIINNTENLVRELLAVPDNYKVIFLQGGGCGQFSAVPLNLIGLKAGRCADYVVTGAWSAKAAEEAKKFGTINIVHPKLGSYTKIPDPSTWNLNPDASYVYYCANETVHGVEFDFIPDVKGAVLVCDMSSNFLSKPVDVSKFGVIFAGAQKNVGSAGVTVVIVRDDLLGFALRECPSVLEYKVQAGNSSLYNTPPCFSIYVMGLVLEWIKNNGGAAAMEKLSSIKSQTIYEIIDNSQGFYVCPVEPQNRSKMNIPFRIGNAKGDDALEKRFLDKALELNMLSLKGHRSVGGIRASLYNAVTIEDVQKLAAFMKKFLEMHQL

SEQ ID NO: 1130 - protein, 370 aa, synthetic construct
MDAPRQVVNFGPGPAKLPHSVLLEIQKELLDYKGVGISVLEMSHRSSDFAKIINNTENLVRELLAVPDNFKVIFLQGGGCGQFSAVPLNLIGLKAGRCADYVVTGAWSAKAAEEAKKFGTINIVHPKLGSYTKIPDPSTWNLNPDASYVYYCANETVHGVEFDFIPDVKGAVLVCDMSSNFLSKPVDVSKFGVIFAGAQKNVGSAGVTVVIVRDDLLGFALRECPSVLEYKVQAGNSSLYNTPPCFSIYVMGLVLEWIKNNGGAAAMEKLSSIKSQTIYEIIDNSQGFYVCPVEPQNRSKMNIPFRIGNAKGDDALEKRFLDKALELNMLSLKGHRSVGGIRASLYNAVTIEDVQKLAAFMKKFLEMHQL

SEQ ID NO: 1131 - protein, 370 aa, synthetic construct
MDAPRQVVNFGPGPAKLPHSVLLEIQKELLDYKGVGISVLEMSHRSSDFAKIINNTENLVRELLAVPDNYKVIFLQGGGCGQFSAVPLNLIGLKAGRCADYVVTGAWSAKAAEEAKKFGTINIVHPKLGSYTKIPDPSTWNLNPDASYVYYCANETVHGVEFDFIPDVKGAVLVCDMSSNFLSKPVDVSKFGVIFAGAQKNVGSAGVTVVIVRDDLLGFALRECPSVLEYKVQAGNSSLYNTPPCFSIYVMGLVLEWIKNNGGAAAMQKLSSIKSQTIYEIIDNSQGFYVCPVEPQNRSKMNIPFRIGNAKGDDALEKRFLDKALELNMLSLKGHRSVGGIRASLYNAVTIEDVQKLAAFMKKFLEMHQL

SEQ ID NO: 1132 - protein, 370 aa, synthetic construct
MDAPRQVVNFGPGPAKLPHSVLLEIQKELLDYKGVGISVLEMSHRSSDFAKIINNTENLVRELLAVPDNYKVIFLQGGGCGQFSAVPLNLIGLKAGRCADYVVTGAWSAKAAEEAKKFGTINIVHPKLGSYTKIPDPSTWNLNPDASYVYYCANETVHGVEFDFIPDVKGAVLVCDMSSNFLSKPVDVSKFGVIFAGAQKNVGSAGVTVVIVRDDLLGFALRECPSVLEYKVQAGNSSLYNTPPCFSIYVMGLVLEWIKNTGGAAAMEKLSSIKSQTIYEIIDNSQGFYVCPVEPQNRSKMNIPFRIGNAKGDDALEKRFLDKALELNMLSLKGHRSVGGIRASLYNAVTIEDVQKLAAFMKKFLEMHQL

SEQ ID NO: 1133 - protein, 370 aa, synthetic construct
MDAPRQVVNFGPGPAKLPHSVLLEIQKELLDYKGVGISVLEMSHRSSDFAKIINNTENLVRELLAVPDNYKVIFLQGGGCGQFSAVPLNLIGLKAGRCADYVVTGAWSAKAAEEAKKFGTINIVHPKLGSYTKIPDPSTWNLNPDASYVYYCANETVHGVEFDFIPDVKGAVLVCDMSSNFLSKPVDVSKFGVIFAGAQKNVGSAGVTVVIVRDDLLGFALRECPSVLEYKVQAGNSSLYNTPPCFSIYVMGLVLEWIKNNGGAAAMEKLSSIKSQTIYEIIDNSQGFYVCPVEPQNRSKMNIPFRIGTAKGDDALEKRFLDKALELNMLSLKGHRSVGGIRASLYNAVTIEDVQKLAAFMKKFLEMHQL

SEQ ID NO: 1134 - protein, 370 aa, synthetic construct
MDAPRQVVNFGPGPAKLPHSVLLEIQKELLDYKGVGISVLEMSHRSSDFAKIINNTENLVRELLAVPDNYKVIFLQGGGCGQFSAVPLNLIGLKAGRCADYVVTGAWSAKAAEEAKKFGTINIVHPKLGSYTKIPDPSTWNLNPDASYVYYCANETVHGVEFDFIPDVKGAVLVCDMSSNFLSKPVDVSKFGVIFAGAQKNVGSAGVTVVIVRDDLLGFALRECPSVLEYKVQAGNSSLYNTPQCFSIYVMGLVLEWIKNNGGAAAMEKLSSIKSQTIYEIIDNSQGFYVCPVEPQNRSKMNIPFRIGNAKGDDALEKRFLDKALELNMLSLKGHRSVGGIRASLYNAVTIEDVQKLAAFMKKFLEMHQL

SEQ ID NO: 1135 - protein, 370 aa, synthetic construct
MDAPRQVVNFGPGPAKLPHSVLLEIQKELLDYKGVGISVLEMSHRSSDFAKIINNTENLVRELLAVPDNYKVIFLQGGGCGQFSAVPLNLIGLKAGRCADYVVTGAWSAKAAEEAKKFGTINIVHPKLGSYTKIPDPSTWNLNPDASYVYYCANETVHGVEFDFIPDVKGAVLVCDMSSNFLSKPVDVSKFGVIFAGAQKNVGSAGVTVVIVRDDLLGFALRECPSVLEYKVQAGNSSLYNTPPCFSIYVMGLVLEWIKNNGGAAAMEMLSSIKSQTIYEIIDNSQGFYVCPVEPQNRSKMNIPFRIGNAKGDDALEKRFLDKALELNMLSLKGHRSVGGIRASLYNAVTIEDVQKLAAFMKKFLEMHQL

SEQ ID NO: 1136 - protein, 370 aa, synthetic construct
MDAPRQVVNFGPGPAKLPHSVLLEIQKELLDYKGVGISVLEMSHRSSDFAKIINNTENLVRELLAVPDNYKVIFLQGGGCGQFSAVPLNLIDLKAGRCADYVVTGAWSAKAAEEAKKFGTINIVHPKLGSYTKIPDPSTWNLNPDASYVYYCANETVHGVEFDFIPDVKGAVLVCDMSSNFLSKPVDVSKFGVIFAGAQKNVGSAGVTVVIVRDDLLGFALRECPSVLEYKVQAGNSSLYNTPPCFSIYVMGLVLEWIKNNGGAAAMEKLSSIKSQTIYEIIDNSQGFYVCPVEPQNRSKMNIPFRIGNAKGDDALEKRFLDKALELNMLSLKGHRSVGGIRASLYNAVTIEDVQKLAAFMKKFLEMHQL

SEQ ID NO: 1137 - protein, 370 aa, synthetic construct
MDAPRQVVNFGPGPAKLPHSVLLEIQKELLDYKGVGISVLEMSHRSSDFAKIINNTENLVRELLAVPDNYKVIFLQGGGCGQFSAVPLNLIGLKAGRCADYVVTGAWSAKAAEEAKKFGTINIVHPKLGSYTKIPDPSTWNLNPDASYVYYSANETVHGVEFDFIPDVKGAVLVCDMSSNFLSKPVDVSKFGVIFAGAQKNVGSAGVTVVIVRDDLLGFALRECPSVLEYKVQAGNSSLYNTPPCFSIYVMGLVLEWIKNNGGAAAMEKLSSIKSQTIYEIIDNSQGFYVCPVEPQNRSKMNIPFRIGNAKGDDALEKRFLDKALELNMLSLKGHRSVGGIRASLYNAVTIEDVQKLAAFMKKFLEMHQL

SEQ ID NO: 1138 - protein, 370 aa, synthetic construct
MDAPRQVVNFGPGPAKLPHSVLLEIQKELLDYKGVGISVLEMSHRSSDFAKIINNTENLVRELLAVPDNYKVIFLQGGGCGQFSAVPLNLIGLKAGRCADYVVTGAWSAKAAEEAKKFGTINIVHPKLGSYTKIPDPSTWYLNPDASYVYYCANETVHGVEFDFIPDVKGAVLVCDMSSNFLSKPVDVSKFGVIFAGAQKNVGSAGVTVVIVRDDLLGFALRECPSVLEYKVQAGNSSLYNTPPCFSIYVMGLVLEWIKNNGGAAAMEKLSSIKSQTIYEIIDNSQGFYVCPVEPQNRSKMNIPFRIGNAKGDDALEKRFLDKALELNMLSLKGHRSVGGIRASLYNAVTIEDVQKLAAFMKKFLEMHQL

SEQ ID NO: 1139 - protein, 370 aa, synthetic construct
MDAPRQVVNFGPGPAKLPHSVLLEIQKELLDYKGVGISVLEMSHRSSDFAKIINNTENLVRELLAVPDNYKVIFLQGGGCGQFSAVPLNLIGLKAGRCADYVVTGAWSAKAAEEAKKFGTINIVHPKLGSYTKIPDPSTWNLNPDASYVYYCANETVHGVEFDFIPDVKGAVLVCDMSSNFLSKPVDVSKFGVIFAGAQKNVGSAGVTVVIVRDDLLGFALRECPSVLEYKVQAGNSYLYNTPPCFSIYVMGLVLEWIKNNGGAAAMEKLSSIKSQTIYEIIDNSQGFYVCPVEPQNRSKMNIPFRIGNAKGDDALEKRFLDKALELNMLSLKGHRSVGGIRASLYNAVTIEDVQKLAAFMKKFLEMHQL

SEQ ID NO: 1140 - protein, 370 aa, synthetic construct
MDAPRQVVNFGPGPAKLPHSVLLEIQKELLDYKGVGISVLEMSHRSSDFAKIINNTENLVRELLAVPDNYKVIFLQGGGCGQFSAVPLNLIGLKAGRCADYVVTGAWSAKAAEEAKKFGTINIVHPKLGSYTKIPDPSTWNLNPDASYVYYCANETVHGVEFDFIPDVKGAVLVCDMSSNFLSKPVDVSKFGVIFAGAQKNVGSAGVTVVIVRDDLLRFALRECPSVLEYKVQAGNSSLYNTPPCFSIYVMGLVLEWIKNNGGAAAMEKLSSIKSQTIYEIIDNSQGFYVCPVEPQNRSKMNIPFRIGNAKGDDALEKRFLDKALELNMLSLKGHRSVGGIRASLYNAVTIEDVQKLAAFMKKFLEMHQL

SEQ ID NO: 1141 - protein, 370 aa, synthetic construct
MDAPRQVVSFGPGPAKLPHSVLLEIQKELLDYKGVGISVLEMSHRSSDFAKIINNTENLVRELLAVPDNYKVIFLQGGGCGQFSAVPLNLIGLKAGRCADYVVTGAWSAKAAEEAKKFGTINIVHPKLGSYTKIPDPSTWNLNPDASYVYYCANETVHGVEFDFIPDVKGAVLVCDMSSNFLSKPVDVSKFGVIFAGAQKNVGSAGVTVVIVRDDLLGFALRECPSVLEYKVQAGNSSLYNTPPCFSIYVMGLVLEWIKNNGGAAAMEKLSSIKSQTIYEIIDNSQGFYVCPVEPQNRSKMNIPFRIGNAKGDDALEKRFLDKALELNMLSLKGHRSVGGIRASLYNAVTIEDVQKLAAFMKKFLEMHQL

SEQ ID NO: 1142 - protein, 370 aa, synthetic construct
MDAPRQVVNFGPGPAKLPHSVLLEIQKELLDYKGVGISVLEMSHRSSDFAKIINNTENLVRELLAVPDNYKVIFLQGGGCGQFSAVPLNLIGLKAGRCADYVVTGAWSAKAAEEAKKFGTINIVHPKLGSYTKIPDPSTWNLNPDASYVYYCANETVHGVEFDFIPDVKGAVLVCDMSSNFLSKPVDVSKFGVIFAGAQKNVGSAGVTVVIVRDDLLGFALRECPSVLEYKLQAGNSSLYNTPPCFSIYVMGLVLEWIKNNGGAAAMEKLSSIKSQTIYEIIDNSQGFYVCPVEPQNRSKMNIPFRIGNAKGDDALEKRFLDKALELNMLSLKGHRSVGGIRASLYNAVTIEDVQKLAAFMKKFLEMHQL

SEQ ID NO: 1143 - protein, 370 aa, synthetic construct
MDAPRQVVNFGPGPAKLPHSVLLEIQKELLDYKGVGISVLEMSHRSSDFAKIINNTENLVRELLAVPDNYKVIFLQGGGCGQFSAVPLNLIGLKAGRCADYVVTGAWSAKAAEEAKKFGTINIVHPKLGSYTKIPDPSTWNLNPDASYVYYCANETVHGVEFDFIPDVKGAVLVCDMSSNFLSKPVDVSKFGVIFAGAQKNVGSAGVTVVIVRDDLLGFALRECPSVLEYKVQAGNSSLYNTPPCFSIYVMGLVLEWLKNNGGAAAMEKLSSIKSQTIYEIIDNSQGFYVCPVEPQNRSKMNIPFRIGNAKGDDALEKRFLDKALELNMLSLKGHRSVGGIRASLYNAVTIEDVQKLAAFMKKFLEMHQL

SEQ ID NO: 1144 - protein, 370 aa, synthetic construct
MDAPRQVVNFGPGPAKLPHSVLLEIQKELLDYKGVGISVLEMSHRSSDFAKIINNTENLVRELLAVPDNYKVIFLQGGGCGQFSAVPLNLIGLKAGRCADYVVTGAWSAKAAEEAKKFGTINIVHPKLGSYTKIPDPSTWNLNPDASYVYYCANETVHGVEFDFIPDVKGAVLVCDMSSNFLSKPVDVSKFGVIFAGAQKNVGSAGVTVVIVRDDLLGFALRECPSVLEYKVQAGNSSLYNTPPCFSIYVMGLVLEWIKNNGGAAAMEKLSSIKSQTIYEIIDSSQGFYVCPVEPQNRSKMNIPFRIGNAKGDDALEKRFLDKALELNMLSLKGHRSVGGIRASLYNAVTIEDVQKLAAFMKKFLEMHQL

SEQ ID NO: 1145 - protein, 370 aa, synthetic construct
MDAPRQVVNFGPGPAKLPHSVLLEIQKELLDYKGVGISVLEMSHRSSDFAKIINNTENLVRELLAVPDNYKVIFLQGGGCGQFSAVPLNLIGLKAGRCADYVVTGAWSAKAAEEAKKFGTINIVHPKLGSYTKIPDPSTWNLNPDASYVYYCANETVHGVEFDFIPDVKGAVLVCDMSSNFLSKPVDVSKFGVIFAGAQKNVGSAGVTVVIVRDDLLGFALRECPSVLEYKVQAGNSSLYNTPPCFSIYVMGLVLDWIKNNGGAAAMEKLSSIKSQTIYEIIDNSQGFYVCPVEPQNRSKMNIPFRIGNAKGDDALEKRFLDKALELNMLSLKGHRSVGGIRASLYNAVTIEDVQKLAAFMKKFLEMHQL

SEQ ID NO: 1146 - protein, 370 aa, synthetic construct
MDAPRQVVNFGPGPAKLPHSVLLEIQKELLDYKGVGISVLEMSHRSSDFAKIINNTENLVRELLAVPDNYKVIFLQGGGCGQFNAVPLNLIGLKAGRCADYVVTGAWSAKAAEEAKKFGTINIVHPKLGSYTKIPDPSTWNLNPDASYVYYCANETVHGVEFDFIPDVKGAVLVCDMSSNFLSKPVDVSKFGVIFAGAQKNVGSAGVTVVIVRDDLLGFALRECPSVLEYKVQAGNSSLYNTPPCFSIYVMGLVLEWIKNNGGAAAMEKLSSIKSQTIYEIIDNSQGFYVCPVEPQNRSKMNIPFRIGNAKGDDALEKRFLDKALELNMLSLKGHRSVGGIRASLYNAVTIEDVQKLAAFMKKFLEMHQL

SEQ ID NO: 1147 - protein, 370 aa, synthetic construct
MDAPRQVVNFGPGPAKLPHSVLLEIQKELLDYKGVGISVLEMSHRSSDFAKIINNTENLVRELLAVPDNYKVIFLQGGGCGQFSAVPLNLIGLKAGRCADYVVTGAWSAKAAEEAKKFGTINIVHPKLGSYTKIPDPSTWNLNPDASYVYYCANETVHGVEFDFIPDVKGAVLVCDMSSNFLSKPVDVSKFGVIFAGAQKNVGSAGVTVVIVRDDLLGFALRECPSVLEYKVQAGNSSLYNTPPCFSIYVMGLVLEWIKNNGGAAAMEKLSSIKSQTIYEIIDNSQGFYVCPVEPQNRSKMNIPFRIGNAKGDDALEKRFLDKALELNMLSLKGHRSVGGIRASLYNAVTIEDVQKLAAFMKKFLEMHHL

SEQ ID NO: 1148 - protein, 370 aa, synthetic construct
MDAPRQVVNFGPGPAKLPHSVLLEIQKELLDYKGVGISVLEMSHRSSDFAKIINNTENLVRELLAVPDNYKVIFLQGGGCGQFSAVPLNLIGLKAGRCADYVVTGAWSAKAAEEAKKFGTINIVHPKLGSYTKIPDPSTWNLNPDSSYVYYCANETVHGVEFDFIPDVKGAVLVCDMSSNFLSKPVDVSKFGVIFAGAQKNVGSAGVTVVIVRDDLLGFALRECPSVLEYKVQAGNSSLYNTPPCFSIYVMGLVLEWIKNNGGAAAMEKLSSIKSQTIYEIIDNSQGFYVCPVEPQNRSKMNIPFRIGNAKGDDALEKRFLDKALELNMLSLKGHRSVGGIRASLYNAVTIEDVQKLAAFMKKFLEMHQL

SEQ ID NO: 1149 - protein, 370 aa, synthetic construct
MDAPRQVVNFGPGPAKLPHSVLLEIQKELLDYKGVGISVLEMSHRSSDFAKIINNTENLVRELLAVPDNYKVIFLQGGGCGQFSAVPLNLIGLKAGRCADYVVTGAWSAKAAEEAKKFGTINIVHPKLGSYTKIPDPSTWNLNPDASYVYYCANETVHGVEFDFIPDVKGAVLVCDMSSNFLSKPVDVSKFGVIFAGAQKNVGSAGVTVVIVRDDLLGFALRECPSVLEYEVQAGNSSLYNTPPCFSIYVMGLVLEWIKNNGGAAAMEKLSSIKSQTIYEIIDNSQGFYVCPVEPQNRSKMNIPFRIGNAKGDDALEKRFLDKALELNMLSLKGHRSVGGIRASLYNAVTIEDVQKLAAFMKKFLEMHQL

SEQ ID NO: 1150 - protein, 370 aa, synthetic construct
MDAPRQVVNFGPGPAKLPHSVLLEIQKELLDYKGVGISVLEMSHRSSDFAKIINNTENLVRELLAVPDNYKVIFLQGGGCGQFSAVPLNLIGLKAGRCADYVVTGAWSAKAAEEAKKFGTINIVHPKLGSYTKIPDPSTWNLNPDASYVYYCANETVHGVEFDFIPDVKGAVLVCDMSSNFLSKPVDVSKFGVIFAGAQKNVGSAGVTVVIVRDDLLGFALRECPSVLEYKVQAGNSSLYNTPPCFSIYVMGLGLEWIKNNGGAAAMEKLSSIKSQTIYEIIDNSQGFYVCPVEPQNRSKMNIPFRIGNAKGDDALEKRFLDKALELNMLSLKGHRSVGGIRASLYNAVTIEDVQKLAAFMKKFLEMHQL

SEQ ID NO: 1151 - protein, 370 aa, synthetic construct
MDAPRQVVNFGPGPAKLPHSVLLEIQKELLDYKGVGISVLEMSHRSSDFAKIINNTENLVRELLAVPDNYKVIFLQGGGCGQFSAVPLNLIGLKAGRCADYVVTGAWSAKAAEEAKKFGTINIVHPKLGSYTKIPDPSTWNLNPDASYVYYCANETVHGVEFDFIPDVKGAVLVCDMSSNFLSKPVDVSKFGVIFAGAQKNVGSAGVTVVIVRDDLLGFALRECPSVLEYKVQAGNSSLYNTPPCFSIYVMGLVLEWIKNNGGAAAMEKLSSIKSQTIYEIIDNSQGFYVCPVEPQNRSKMNIPFRIGNAKGDDALEKRFLDKALELNMLSLKGHRSVGGIRASLYNAVTIEDVQKLAAFMKKFLEMDQL

SEQ ID NO: 1152 - protein, 370 aa, synthetic construct
MDAPRQVVNFGPGPAKLPHSVLLEIQKELLDYKGVGISVLEMSHRSSDFAKIINNTENLVRELLAVPDNYKVIFLQGGGCGQFSAVPLNLIGLKAGRCADYVVTGAWSAKAAEEAKKFGTINIVHPKLGSYTKIPDPSTWNLNPDASYVYYCANETVHGVEFDFIPDVKGAVLVCDMSSNFLSKPVDVSKFGVIFAGAQKNVGSAGVTVVIVRDDLLGFALRECPSVLEYKVQAGNSSLYNTPPCFSIYVMGWVLEWIKNNGGAAAMEKLSSIKSQTIYEIIDNSQGFYVCPVEPQNRSKMNIPFRIGNAKGDDALEKRFLDKALELNMLSLKGHRSVGGIRASLYNAVTIEDVQKLAAFMKKFLEMHQL

SEQ ID NO: 1153 - protein, 370 aa, synthetic construct
MDAPRQVVNFGPGPAKLPHSVLLEIQKELLDYKGVGISVLEMSHRSSDFAKIINNTENLVRELLAVPDNYKVIFLQGGGCGQFSAVPLNLIGLKAGRCADYVVTGAWSAKAAEEAKKFGTINIVHPKLGSYTKIPDPSTWNLNPDASYVYYCANETVHGVEFDFIPDVKGAVLVCDMSSNFLSKPVDVSKFGVIFAGAQKNVGSAGVTVVIVRDDLLGFALRECPSVLEYKVQAGNSSLYNTPPCFSIYVMGLVLVWIKNNGGAAAMEKLSSIKSQTIYEIIDNSQGFYVCPVEPQNRSKMNIPFRIGNAKGDDALEKRFLDKALELNMLSLKGHRSVGGIRASLYNAVTIEDVQKLAAFMKKFLEMHQL

SEQ ID NO: 1154 - protein, 370 aa, synthetic construct
MDAPRQVVNFGPGPAKLPHSVLLEIQKELLDYKGVGISVLEMSHRSSDFAKIINNTENLVRELLAVPDNYKVIFLQGGGCGQFSAVPLNLIGLKAGRCADYVVTGAWSAKAAEEAKKFGTINIVHPKLGSYTKIPDPSTWNLNPDASYVYYCANETVHGVEFDFIPDVKGAVLVCDMSSNFLSKPVDVSKFGVIFAGAQKNVGSAGVTVVIVRDDLLGFALRECPSVLEYKVQAGNSSLYNTPPCFSIYVMGLVLEWIKNNEGAAAMEKLSSIKSQTIYEIIDNSQGFYVCPVEPQNRSKMNIPFRIGNAKGDDALEKRFLDKALELNMLSLKGHRSVGGIRASLYNAVTIEDVQKLAAFMKKFLEMHQL

SEQ ID NO: 1155 - protein, 370 aa, synthetic construct
MDAPRQVVNFGPGPAKLPHSVLLEIQKELLDYKGVGISVLEMSHRSSDFAKIINNTENLVRELLAVPDNYKVIFLQGGGCGQFSAVPLNLIGLKAGRCADYVVTGAWSAKAAEEAKKFGTINIVHPKLGSYTKIPDPSTWNLNPDASYVYYCANETVHGVEFDFIPDVKGAVLVCDMSSNFLSKPVDVSKFGVIFAGAQKNVGSAGVTVVIVRDDLLGFALRECPSVLEYKVQAGNSSLYNTPPCFSIYVMGLVLEWIKNNGGAAAMEKLSSIKSQTIYEIIDNSQGFYVCPVEPQNRSKMNIPFSIGNAKGDDALEKRFLDKALELNMLSLKGHRSVGGIRASLYNAVTIEDVQKLAAFMKKFLEMHQL

SEQ ID NO: 1156 - protein, 370 aa, synthetic construct
MDAPRQVVNFGPGPAKLPHSVLLEIQKELLDYKGVGISVLEMSHRSSDFAKIINNTENLVRELLAVPDNYKVIFLQGGGCGQFSAVPLNLIGLKAGRCADYVVTGAWSAKAAEEAKKFGTINIVHPKLGSYTKIPDPSTWNLNPDASYVYYCANETVHGVEFDFIPDVKGAVLVCDMSSNFLSKPVDVSKFGVIFAGAQKNVGSAGVTVVIVRDDLLGFALRECPSVLEYKVKAGNSSLYNTPPCFSIYVMGLVLEWIKNNGGAAAMEKLSSIKSQTIYEIIDNSQGFYVCPVEPQNRSKMNIPFRIGNAKGDDALEKRFLDKALELNMLSLKGHRSVGGIRASLYNAVTIEDVQKLAAFMKKFLEMHQL

SEQ ID NO: 1157 - protein, 370 aa, synthetic construct
MDAPRQVVNFGPGPAKLPHSVLLEIQKELLDYKGVGISVLEMSHRSSDFAKIINNTENLVRELLAVPDNYKVIFLQGGGCGQFSAVPLNLIGLKAGRCADYVVTGAWSAKAAEEAKKFGTINIVHPKLGSYTKIPDPSTWNLNPDASYVYYCANETVHGVEFDFIPDVKGAVLVCDMSSNFLSKPVDVSKFGVIFAGAQKNVGSAGVTVVIVRDDLLGFALRECPSVLEYKVQAGNSSLYNTPPCFSIYVMGLVLEWIKNNGGAAAMEKLSSIKSQTMYEIIDNSQGFYVCPVEPQNRSKMNIPFRIGNAKGDDALEKRFLDKALELNMLSLKGHRSVGGIRASLYNAVTIEDVQKLAAFMKKFLEMHQL

SEQ ID NO: 1158 - protein, 370 aa, synthetic construct
MDAPRQVVNFGPGPAKLPHSVLLEIQKELLDYKGVGISVLEMSHRSSDFAKIINNTENLVRELLAVPDNYKVIFLQGGGCGQFSAVPLNLIGLKAGRCADYVVTGAWSAKAAEEAKKFGTINIVHPKLGSYTKIPDPSTWNLNPDASYVYYCANETVHGVEFDFIPDVKGAVLVCDMSSNFLSKPVDVSKFGVIFAGAQKNVGSAGVTVVIVRDDLLGFALRECPSVLEYKVQAGNSSLYNTPPCFSIYVMGLVLEWIKNNGGAAAMEKLSSIKSQTIYEIIDNSQGFYVCPVVPQNRSKMNIPFRIGNAKGDDALEKRFLDKALELNMLSLKGHRSVGGIRASLYNAVTIEDVQKLAAFMKKFLEMHQL

SEQ ID NO: 1159 - protein, 370 aa, synthetic construct
MDAPRQVVNFGPGPAKLPHSVLLEIQKELLDYKGVGISVLEMSHRSSDFAKIINNTENLVRELLAVPDNYKVIFLQGGGCGQFSAVPLNLIGLKAGRCADYVVTGAWSAKAAEEAKKFGTINIVHPKLGSYTKIPDPSTWNLNPDASYVYYCANETVHGVEFDFIPDVKGAVLACDMSSNFLSKPVDVSKFGVIFAGAQKNVGSAGVTVVIVRDDLLGFALRECPSVLEYKVQAGNSSLYNTPPCFSIYVMGLVLEWIKNNGGAAAMEKLSSIKSQTIYEIIDNSQGFYVCPVEPQNRSKMNIPFRIGNAKGDDALEKRFLDKALELNMLSLKGHRSVGGIRASLYNAVTIEDVQKLAAFMKKFLEMHQL

SEQ ID NO: 1160 - protein, 370 aa, synthetic construct
MDAPRQVVNFGPGPAKLPHSVLLEIQKELLDYKGVGISVLEMSHRSSDFAKIINNTENLVRELLAVPDNYKVIFLQGGGCGQFSAVPLNLIGLKAGRCADYVVTGAWSAKAAEEAKKFGTINIVHPKLGSYTKIPDPSTWNLNPDASYVYYCANETVHGVEFDFIPDVKGAVLVCDMSSNFLSKPVDVSKFGVIFAGAQKNVGSAGVTVVIVRDDLLGFALRECPSVLEYKVQAGNSSLYNTPPCFSIYVMGLVLEWIKNIGGAAAMEKLSSIKSQTIYEIIDNSQGFYVCPVEPQNRSKMNIPFRIGNAKGDDALEKRFLDKALELNMLSLKGHRSVGGIRASLYNAVTIEDVQKLAAFMKKFLEMHQL

SEQ ID NO: 1161 - protein, 370 aa, synthetic construct
MDAPRQVVNFGPGPAKLPHSVLLEIQKELLDYKGVGISVLEMCHRSSDFAKIINNTENLVRELLAVPDNYKVIFLQGGGCGQFSAVPLNLIGLKAGRCADYVVTGAWSAKAAEEAKKFGTINIVHPKLGSYTKIPDPSTWNLNPDASYVYYCANETVHGVEFDFIPDVKGAVLVCDMSSNFLSKPVDVSKFGVIFAGAQKNVGSAGVTVVIVRDDLLGFALRECPSVLEYKVQAGNSSLYNTPPCFSIYVMGLVLEWIKNNGGAAAMEKLSSIKSQTIYEIIDNSQGFYVCPVEPQNRSKMNIPFRIGNAKGDDALEKRFLDKALELNMLSLKGHRSVGGIRASLYNAVTIEDVQKLAAFMKKFLEMHQL

SEQ ID NO: 1162 - protein, 370 aa, synthetic construct
MDAPRQVVNFGPGPAKLPHSVLLEIQKELLDYKGVGISVLEMSHRSSDFAKIINNTENLVRELLAVPDNYRVIFLQGGGCGQFSAVPLNLIGLKAGRCADYVVTGAWSAKAAEEAKKFGTINIVHPKLGSYTKIPDPSTWNLNPDASYVYYCANETVHGVEFDFIPDVKGAVLVCDMSSNFLSKPVDVSKFGVIFAGAQKNVGSAGVTVVIVRDDLLGFALRECPSVLEYKVQAGNSSLYNTPPCFSIYVMGLVLEWIKNNGGAAAMEKLSSIKSQTIYEIIDNSQGFYVCPVEPQNRSKMNIPFRIGNAKGDDALEKRFLDKALELNMLSLKGHRSVGGIRASLYNAVTIEDVQKLAAFMKKFLEMHQL

SEQ ID NO: 1163 - protein, 370 aa, synthetic construct
MDAPRQVVNFGPGPAKLPHSVLLEIQKELLDYKGVGISVLEMSHRSSDFAKIINNTENLVRELLAVPDNYKVIFLQGGGCGQFSAVPLNLIGLKAGRCADYVVTGAWSAKAAEEAKKFGTINIVHPKLGSYTKIPDPCTWNLNPDASYVYYCANETVHGVEFDFIPDVKGAVLVCDMSSNFLSKPVDVSKFGVIFAGAQKNVGSAGVTVVIVRDDLLGFALRECPSVLEYKVQAGNSSLYNTPPCFSIYVMGLVLEWIKNNGGAAAMEKLSSIKSQTIYEIIDNSQGFYVCPVEPQNRSKMNIPFRIGNAKGDDALEKRFLDKALELNMLSLKGHRSVGGIRASLYNAVTIEDVQKLAAFMKKFLEMHQL

SEQ ID NO: 1164 - protein, 370 aa, synthetic construct
MDAPRQVVNFGPGPAKLPHSVLLEIQKELLDYKGVGISVLEMSHRSSDFAKIINNTENLVRELLAVPDNYKVIFLQGGGCGQFSAVPLNLIGLKAGRCADYVVTGAWSAKAAEEAKKFGTINIVHPKLGSYTKIPDPSTWNLNPDASYVYYCANETVHGVEFDFIPDVKGAVLVCDMSSNFLSKPVDVSKFGVIFAGAQKNVGSAGVTVVIVRDDLLGFALRECPSVLEYKVQAGNSSLYNTPPCFSIYVMGLVLEWIKNNGGAAAMEKLSSIKSQTIYEIIDNSQGFYVCPVEPQNRSKMNIPFRIGNAKGDDALEKRFLDKAPELNMLSLKGHRSVGGIRASLYNAVTIEDVQKLAAFMKKFLEMHQL

SEQ ID NO: 1165 - protein, 370 aa, synthetic construct
MDAPRQVVNFGPGPAKLPHSVLLEIQKELLDYKGVGISVLEMSHRSSDFAKIINNTENLVRELLAVPDNYKVIFLQGGGCGQFSAVPLNLIGLKAGRCADYVVTGAWSAKAAEEAKKFGTINIVHPKLGSYTKIPDPSTWNLNPDASYVYYCANETVHGVEFDFIPDVKGAVLVCDMSSNFLSKPVDVSKFGVIFAGAQKNVGSAGVTVVIVRDDLLGFALRECPSVLEYKVQAGNSSLYNTPPCFSIYVMGLVLEWIKNNGGAAAMEKLSSIKSQTIYEIIDNSQGFYVCPVEPQNRSKMNIPFRIGNAKGDDALEKRFLGKALELNMLSLKGHRSVGGIRASLYNAVTIEDVQKLAAFMKKFLEMHQL

SEQ ID NO: 1166 - protein, 370 aa, synthetic construct
MGAPRQVVNFGPGPAKLPHSVLLEIQKELLDYKGVGISVLEMSHRSSDFAKIINNTENLVRELLAVPDNYKVIFLQGGGCGQFSAVPLNLIGLKAGRCADYVVTGAWSAKAAEEAKKFGTINIVHPKLGSYTKIPDPSTWNLNPDASYVYYCANETVHGVEFDFIPDVKGAVLVCDMSSNFLSKPVDVSKFGVIFAGAQKNVGSAGVTVVIVRDDLLGFALRECPSVLEYKVQAGNSSLYNTPPCFSIYVMGLVLEWIKNNGGAAAMEKLSSIKSQTIYEIIDNSQGFYVCPVEPQNRSKMNIPFRIGNAKGDDALEKRFLDKALELNMLSLKGHRSVGGIRASLYNAVTIEDVQKLAAFMKKFLEMHQL

SEQ ID NO: 1167 - protein, 370 aa, synthetic construct
MDAPRQVVNFGPGPAKLPHSVLLEIQKELLDYKGVGISVLEMSHRSSDFAKIINNTENLVRELLAVPDNYKVIFLQGGGCGQFSAVPLNLIGLKAGRCADYVVTGAWSAKAAEEAKKFGTINIVHPKLGSYTKIPDPSTWNLNPDASYVYYCANETVHGVEFDFIPDVKGAVLVCDMSSNFLSKPVDVSKFGVIFAGAQKNVGSAGVTVVIVRDDLLGFALRECPSVLEYKVQAGNSSLYNTPPCFSIYVMGLVLEWIKNNGGAAAMEKLSSIKSQTIYEIIDNSQGFYVCPVEPQNRSKMNIPFRIGNAKGDDALEKRFLDKALELNMLSLKGHRSVGGIRASLYNAVTIEDVQKLTAFMKKFLEMHQL

SEQ ID NO: 1168 - protein, 370 aa, synthetic construct
MDAPRQVVNFGPGPAKLPHSVLLEIQKELLDYKGVGISVLEMSHRSSDFAKIINNTENLVRELLAVPDNYKVIFLQGGGCGQFSAVPLNLIGLKAGRCADYVVTGVWSAKAAEEAKKFGTINIVHPKLGSYTKIPDPSTWNLNPDASYVYYCANETVHGVEFDFIPDVKGAVLVCDMSSNFLSKPVDVSKFGVIFAGAQKNVGSAGVTVVIVRDDLLGFALRECPSVLEYKVQAGNSSLYNTPPCFSIYVMGLVLEWIKNNGGAAAMEKLSSIKSQTIYEIIDNSQGFYVCPVEPQNRSKMNIPFRIGNAKGDDALEKRFLDKALELNMLSLKGHRSVGGIRASLYNAVTIEDVQKLAAFMKKFLEMHQL

SEQ ID NO: 1169 - protein, 370 aa, synthetic construct
MDAPRQVVNFGPGPAKLPHSVLLEIQKELLDYKGVGISVLEMSHRSSDFAKIINNTENLVRELLAVPDNYKVIFLQGGGCGQFSAVPLNLIGLKAGRCADYVVTGAWSAKAAEEAKKFGTINIVHPKLGSYTKIPDPSTWNLNPDASYVYYCANETVHGVEFDFIPDVKGAVLVCDMSSNFLSKPVDVSKFGVIFAGAQKNVGSAGVTVVIVRDDLLGFALRECPSVLEYKVQAGNSSLYNTPPCFSIYVMGLVLEWIKNNGGAAAMENLSSIKSQTIYEIIDNSQGFYVCPVEPQNRSKMNIPFRIGNAKGDDALEKRFLDKALELNMLSLKGHRSVGGIRASLYNAVTIEDVQKLAAFMKKFLEMHQL

SEQ ID NO: 1170 - protein, 370 aa, synthetic construct
MDAPRQVVNFGPGPAKLPHSVLLEIQKELLDYKGVGISVLEMSHRSSDFAKIINNTENLVRELLAVPDNYKVIFLQGGGCGQFSAVPLNLIGLKAGRCADYVVTGAWSAKAAEEAKKFGTINIVHPKLGSYTKIPDPSTWNLNPDASYVYYCANETVHGVEFDFIPDVKGAVLVCDMSSNFLSKPVDVSKFGVIFAGAQKNVGSAGVTVVIVRDDLLGFALRECPSVLEYKEQAGNSSLYNTPPCFSIYVMGLVLEWIKNNGGAAAMEKLSSIKSQTIYEIIDNSQGFYVCPVEPQNRSKMNIPFRIGNAKGDDALEKRFLDKALELNMLSLKGHRSVGGIRASLYNAVTIEDVQKLAAFMKKFLEMHQL

SEQ ID NO: 1171 - protein, 370 aa, synthetic construct
MDAPRQVVNFGPGPAKLPHSVLLEIQKELLDYKGVGISVLEMSHRSSDFAKIINNTENLVRELLAVPDNYKVIFLQGGGCGQFSAVPLNLIGLKAGRCADYVVTGAWSAKAAEGAKKFGTINIVHPKLGSYTKIPDPSTWNLNPDASYVYYCANETVHGVEFDFIPDVKGAVLVCDMSSNFLSKPVDVSKFGVIFAGAQKNVGSAGVTVVIVRDDLLGFALRECPSVLEYKVQAGNSSLYNTPPCFSIYVMGLVLEWIKNNGGAAAMEKLSSIKSQTIYEIIDNSQGFYVCPVEPQNRSKMNIPFRIGNAKGDDALEKRFLDKALELNMLSLKGHRSVGGIRASLYNAVTIEDVQKLAAFMKKFLEMHQL

SEQ ID NO: 1172 - protein, 370 aa, synthetic construct
MDAPRQVVNFGPGPAKLPHSVLLEIQKELLDYKGVGISVLEMSHRSSDFAKIINNTENLVRELLAVPDNYKVIFLQGGGCGQFSAVPLNLIGLKAGRCADYVVTGAWSAKAAEEAKKFGTINIVHPKLGSYTKIPDPSTWNLNPDASYVYYCANETVHGVEFDFIPDVKGAVLVCDMSSNFLSKPVDVSKFGVIFAGAQKNVGSAGVTVVIVRDDLLGFALRECPSVLEYKVQAGNSSLYNTPPCFSIYVMGLVLEWIKNNGGAAAMEKLSSIKSQTIYEIIDNSQGFYVCPVEPQNRSKMNIPFRIGNAKGDDALEKRFLDKALELNMLSLKGHRSVGGIRASLYNAVTIEDVQKLAAIMKKFLEMHQL

SEQ ID NO: 1173 - protein, 370 aa, synthetic construct
MDAPRQVVNFGPGPAKLPHSVLLEIQKELLDYKGVGISVLEMSHRSSDFAKIINNTENLVRELLAVPDNYKVIFLQGGGCGQFSAVPLNLIGLKAGRCADYVVTGAWSAKAAEEAKKFGTINIVHPKLGSYTKIPDPSTWNLNPDASYVYYCANETVHGVEFDFIPDVKGAVLVCDMSSNFLSKPVDVSKFGVIFAGAQKNVGSAGVTVVIVRDDLLGFALRECPSVLEYKVQAGNSSLYNTPPCFSIYVMGLVLEWIKNNGGAAAMEKLSSIKSQTIYEIIDNSQGFYVCPVEAQNRSKMNIPFRIGNAKGDDALEKRFLDKALELNMLSLKGHRSVGGIRASLYNAVTIEDVQKLAAFMKKFLEMHQL

SEQ ID NO: 1174 - protein, 370 aa, synthetic construct
MDAPRQVVNFGPGPAKLPHSVLLEIQKELLDYKGVGISVLEMSHRSSDFAKIINNTENLVRELLAVPDNYKVIFLQGGGCGQFSAVPLNLIGLKAGRCADYVVTGAWSAKAAEEAKKFGTINIVHPKLGSYTKIPDPSTWNLNPDASYVYYCANETVHGVEFDFIPDVKGAVLVCDMSSNFLSKPVDVSKFGVIFAGAQKNVGSAGVTVVIVRDDLLGFALRECPSVLEYKVQAGNSSLYNTPPCFSIYVMGVVLEWIKNNGGAAAMEKLSSIKSQTIYEIIDNSQGFYVCPVEPQNRSKMNIPFRIGNAKGDDALEKRFLDKALELNMLSLKGHRSVGGIRASLYNAVTIEDVQKLAAFMKKFLEMHQL

SEQ ID NO: 1175 - protein, 370 aa, synthetic construct
MDAPRQVVNFGPGPAKLPHSVLLEIQKELLDYKGVGISVLEMSHRSSDFAKIINNTENLVRELLAVPDNYKVIFLQGGGCGQFSAVPLNLIGLKAGRCADYVVTGAWSAKAAEEAKKFGTINIVHPKLGSYTKIPDPSTWNLNPDASYVYYCANETVHGVEFDFIPDVKGAVLVCDMSSNFLSKPVDVSKFGVIFAGAQKNVGSAGVTVGIVRDDLLGFALRECPSVLEYKVQAGNSSLYNTPPCFSIYVMGLVLEWIKNNGGAAAMEKLSSIKSQTIYEIIDNSQGFYVCPVEPQNRSKMNIPFRIGNAKGDDALEKRFLDKALELNMLSLKGHRSVGGIRASLYNAVTIEDVQKLAAFMKKFLEMHQL

SEQ ID NO: 1176 - protein, 370 aa, synthetic construct
MDAPRQVVNFGPGPAKLPHSVLLEIQKELLDYKGVGISVLEMSHRSSDFAKIINNTENLVRELLAVPDNYKVIFLQGGGCGQFSAVPLNLIGLKAGRCADYVVTGAWSAKAAEEAKKFGTINIIHPKLGSYTKIPDPSTWNLNPDASYVYYCANETVHGVEFDFIPDVKGAVLVCDMSSNFLSKPVDVSKFGVIFAGAQKNVGSAGVTVVIVRDDLLGFALRECPSVLEYKVQAGNSSLYNTPPCFSIYVMGLVLEWIKNNGGAAAMEKLSSIKSQTIYEIIDNSQGFYVCPVEPQNRSKMNIPFRIGNAKGDDALEKRFLDKALELNMLSLKGHRSVGGIRASLYNAVTIEDVQKLAAFMKKFLEMHQL

SEQ ID NO: 1177 - protein, 370 aa, synthetic construct
MDAPRQVVNFGPGPAKLPHSVLLEIQKELLDYKGVGISVLEMSHRSSDFAKIINNTENLVRELLAVPDNYKVIFLQGGGCGQFSAVPLNLIGLKAGRCADYVVTGAWSAKAAEEAKKFGTINMVHPKLGSYTKIPDPSTWNLNPDASYVYYCANETVHGVEFDFIPDVKGAVLVCDMSSNFLSKPVDVSKFGVIFAGAQKNVGSAGVTVVIVRDDLLGFALRECPSVLEYKVQAGNSSLYNTPPCFSIYVMGLVLEWIKNNGGAAAMEKLSSIKSQTIYEIIDNSQGFYVCPVEPQNRSKMNIPFRIGNAKGDDALEKRFLDKALELNMLSLKGHRSVGGIRASLYNAVTIEDVQKLAAFMKKFLEMHQL

SEQ ID NO: 1178 - protein, 370 aa, synthetic construct
MDAPRQVVNFGPGPAKLPHSVLLEIQKELLDYKGVGISVLEMSHRSSDFAKIINNTENLVRELLAVPDNYKVIFLQGGGCGQFSAVPLNLIGLKAGRCADYVVTGAWSAKAAEEAKKFGTINIVHPKLGSYTKIPDPSTWNLNPDASYVYYCANETVHGVEFDFIPDVKGAVLVCDMSSNFLSKPVDVSKFGVIFAGAQKNVGSAGGTVVIVRDDLLGFALRECPSVLEYKVQAGNSSLYNTPPCFSIYVMGLVLEWIKNNGGAAAMEKLSSIKSQTIYEIIDNSQGFYVCPVEPQNRSKMNIPFRIGNAKGDDALEKRFLDKALELNMLSLKGHRSVGGIRASLYNAVTIEDVQKLAAFMKKFLEMHQL

SEQ ID NO: 1179 - protein, 370 aa, synthetic construct
MDAPRQVVNFGPGPAKLPHSVLLEIQKELLDYKGVGISVLEMSHRSSDFAKIINNTENLVRELLAVPDNYKVIFLQGGGCGQFSAVPLNLIGLKAGRCADYVVTGAWSAKAAEEAKKFGTINIVHPKLGSYTKIPDPSTWNLNPDASYVYYCANETVHGVEFDFIPDVKGAVLVCDMSSNFLSKPVDVSKFGVIFAGAQKNVGSAGVTVVIVRDDLLGFALRECPSVLEYKVQAGNSSLYNTPPCFSIYVMGLVLEWIKNNGGAAAMEKLSSIKSQTVYEIIDNSQGFYVCPVEPQNRSKMNIPFRIGNAKGDDALEKRFLDKALELNMLSLKGHRSVGGIRASLYNAVTIEDVQKLAAFMKKFLEMHQL

SEQ ID NO: 1180 - protein, 370 aa, synthetic construct
MDAPRQVVNFGPGPAKLPHSVLLEIQKELLDYKGVGISVLEMSHRSSDFAKIINNTENLVRELLAVPDNYKVIFLQGGGCGQFSAVPLNLIGLKAGRCADYVVTGAWSAKAAEEAKKFGTINIVHPKLGSYTKIPDPSTWNLNPDASYVYYCANETVHGVEFDFIPDVKGAVLVCDMSSNFLSKPVDVSKFGVIFAGAQKNVGSAGVTVVIVRDDLLGFALRECPSVLEYKVQAGNSSLYNTPPCFSIYVMGLVLEWIKNNGGAAAMEKLSSIKSQTIYEIIDNSQGFYVCPVEPQNRSKMNIPFRIGNAKGDDALEIRFLDKALELNMLSLKGHRSVGGIRASLYNAVTIEDVQKLAAFMKKFLEMHQL

SEQ ID NO: 1181 - protein, 370 aa, synthetic construct
MDAPRQVVNFGPGPAKLPHSVLLEIQKELLDYKGVGISVLEMSHRSSDFAKIINNTENLVRELLAVPDNYKVIFLQGGGCGQFSAVPLNLIGLKAGRCADYVVTGAWSAKAAEEAKKFGTINIVHPKLGSYTKIPDPSTWNLNPDASYVYYCANETVHGVEFDFIPDVKGAVLVCDMSSNFLSKPVDVSKFGVIFAGAQKNVGSAGVTVVIVRDDLLGFALRECPSVLEYKVQAGNSSLYNTPPCSSIYVMGLVLEWIKNNGGAAAMEKLSSIKSQTIYEIIDNSQGFYVCPVEPQNRSKMNIPFRIGNAKGDDALEKRFLDKALELNMLSLKGHRSVGGIRASLYNAVTIEDVQKLAAFMKKFLEMHQL

SEQ ID NO: 1182 - protein, 370 aa, synthetic construct
MDAPRQVVNFGPGPAKLPHSVLLEIQKELLDYKGVGISVLEMSHRSSDFAKIINNTENLVRELLAVPDNYKVIFLQGGGCGQFSAVPLNLIGLKAGRCADYVVTGAWSAKAADEAKKFGTINIVHPKLGSYTKIPDPSTWNLNPDASYVYYCANETVHGVEFDFIPDVKGAVLVCDMSSNFLSKPVDVSKFGVIFAGAQKNVGSAGVTVVIVRDDLLGFALRECPSVLEYKVQAGNSSLYNTPPCFSIYVMGLVLEWIKNNGGAAAMEKLSSIKSQTIYEIIDNSQGFYVCPVEPQNRSKMNIPFRIGNAKGDDALEKRFLDKALELNMLSLKGHRSVGGIRASLYNAVTIEDVQKLAAFMKKFLEMHQL

SEQ ID NO: 1183 - protein, 370 aa, synthetic construct
MDTPRQVVNFGPGPAKLPHSVLLEIQKELLDYKGVGISVLEMSHRSSDFAKIINNTENLVRELLAVPDNYKVIFLQGGGCGQFSAVPLNLIGLKAGRCADYVVTGAWSAKAAEEAKKFGTINIVHPKLGSYTKIPDPSTWNLNPDASYVYYCANETVHGVEFDFIPDVKGAVLVCDMSSNFLSKPVDVSKFGVIFAGAQKNVGSAGVTVVIVRDDLLGFALRECPSVLEYKVQAGNSSLYNTPPCFSIYVMGLVLEWIKNNGGAAAMEKLSSIKSQTIYEIIDNSQGFYVCPVEPQNRSKMNIPFRIGNAKGDDALEKRFLDKALELNMLSLKGHRSVGGIRASLYNAVTIEDVQKLAAFMKKFLEMHQL

SEQ ID NO: 1184 - protein, 370 aa, synthetic construct
MDAPRQVVNFGPGPAKLPHSVLLEIQMELLDYKGVGISVLEMSHRSSDFAKIINNTENLVRELLAVPDNYKVIFLQGGGCGQFSAVPLNLIGLKAGRCADYVVTGAWSAKAAEEAKKFGTINIVHPKLGSYTKIPDPSTWNLNPDASYVYYCANETVHGVEFDFIPDVKGAVLVCDMSSNFLSKPVDVSKFGVIFAGAQKNVGSAGVTVVIVRDDLLGFALRECPSVLEYKVQAGNSSLYNTPPCFSIYVMGLVLEWIKNNGGAAAMEKLSSIKSQTIYEIIDNSQGFYVCPVEPQNRSKMNIPFRIGNAKGDDALEKRFLDKALELNMLSLKGHRSVGGIRASLYNAVTIEDVQKLAAFMKKFLEMHQL

SEQ ID NO: 1185 - protein, 370 aa, synthetic construct
MDAPRQVVNFGPGPAKLPHSVLLEIQKELLDYKGVGISVLEMSHRLSDFAKIINNTENLVRELLAVPDNYKVIFLQGGGCGQFSAVPLNLIGLKAGRCADYVVTGAWSAKAAEEAKKFGTINIVHPKLGSYTKIPDPSTWNLNPDASYVYYCANETVHGVEFDFIPDVKGAVLVCDMSSNFLSKPVDVSKFGVIFAGAQKNVGSAGVTVVIVRDDLLGFALRECPSVLEYKVQAGNSSLYNTPPCFSIYVMGLVLEWIKNNGGAAAMEKLSSIKSQTIYEIIDNSQGFYVCPVEPQNRSKMNIPFRIGNAKGDDALEKRFLDKALELNMLSLKGHRSVGGIRASLYNAVTIEDVQKLAAFMKKFLEMHQL

SEQ ID NO: 1186 - protein, 370 aa, synthetic construct
MDAPRQVVNFGPGPAKLPHSVLLEIQKELLDYKGVGISVLEMSHRSSDFAKIINNTENLVRELLAVPDNYKVIFLQGGGCGQFSAVPLNLIGLKAGRCADYVVTGAWSAKAAEEAKKFGTINIVHPKLGSYTKIPDPSTWNLNPDASYVYYCANETVHGVEFDFIPDVKGAVLVCDMSSNFLSKPVDVSKFGVIFAGAQKNVGSAGVTVVIVRDDLLGFALRECPSVLEYKVQAGNSSLYNTPPCFSIYVMGLVLEWIKNNGGAAAMEKLSSIKSQTIYEIIDNSQGFYVCPVEPQNRSKMNIPFRIGNAKGDDALEKRFLDKALERNMLSLKGHRSVGGIRASLYNAVTIEDVQKLAAFMKKFLEMHQL

SEQ ID NO: 1187 - protein, 370 aa, synthetic construct
MDAPRQVVNFGPGPAKLPHSVLLEIQKELLDYKGVGISVLEMSHRSSDFAKIINNTENLVRELLAVPDNYKVIFLQGGGCGQFSAVPLNLIGLKAGRCADYVVTGAWSAKAAEEAKKFGTINIVHPKLGSYTKIPDPSTWNLNPDASYVYYCANETVHGVEFDFIPDVKGAVLVCDMSSNFLSKPVDVSKFGVIFAGAQKNVGSAGVTVVIVRDDLLEFALRECPSVLEYKVQAGNSSLYNTPPCFSIYVMGLVLEWIKNNGGAAAMEKLSSIKSQTIYEIIDNSQGFYVCPVEPQNRSKMNIPFRIGNAKGDDALEKRFLDKALELNMLSLKGHRSVGGIRASLYNAVTIEDVQKLAAFMKKFLEMHQL

SEQ ID NO: 1188 - protein, 370 aa, synthetic construct
MDAPRQVVNFGPGPAKLPHSVLLEIQKELLDYKGVGISVLEMSHRSSDFAKIINNTENLVRELLAVPDNYKVIFLQGGGCGQFSAVPSNLIGLKAGRCADYVVTGAWSAKAAEEAKKFGTINIVHPKLGSYTKIPDPSTWNLNPDASYVYYCANETVHGVEFDFIPDVKGAVLVCDMSSNFLSKPVDVSKFGVIFAGAQKNVGSAGVTVVIVRDDLLGFALRECPSVLEYKVQAGNSSLYNTPPCFSIYVMGLVLEWIKNNGGAAAMEKLSSIKSQTIYEIIDNSQGFYVCPVEPQNRSKMNIPFRIGNAKGDDALEKRFLDKALELNMLSLKGHRSVGGIRASLYNAVTIEDVQKLAAFMKKFLEMHQL

SEQ ID NO: 1189 - protein, 370 aa, synthetic construct
MDAPRQVVNFGPGPAKLPHSVLLEIQKELLDYKGVGISVLEMSHRSSDFAKIINNTENLVRELLGVPDNYKVIFLQGGGCGQFSAVPLNLIGLKAGRCADYVVTGAWSAKAAEEAKKFGTINIVHPKLGSYTKIPDPSTWNLNPDASYVYYCANETVHGVEFDFIPDVKGAVLVCDMSSNFLSKPVDVSKFGVIFAGAQKNVGSAGVTVVIVRDDLLGFALRECPSVLEYKVQAGNSSLYNTPPCFSIYVMGLVLEWIKNNGGAAAMEKLSSIKSQTIYEIIDNSQGFYVCPVEPQNRSKMNIPFRIGNAKGDDALEKRFLDKALELNMLSLKGHRSVGGIRASLYNAVTIEDVQKLAAFMKKFLEMHQL

SEQ ID NO: 1190 - protein, 370 aa, synthetic construct
MDAPRQVVNFGPGPAKLPHSVLLEIQKELLDYKGVGISVLEMSHRSSDFAKIINNTENLVRELLAVPDNYKVIFLQGGGCGQFSAVPLNLIGLKAGRCADYVVTGAWSAKAAEEAKKFGTINIVHPKLGSYTKIPDPSTWNLNPDASYVYYCANETVHGVEFDFIPDVKGAVLVCDMSSNFLSKPVDVSKFGVIFAGAQKNVGSAGVTVVIVRDDLLGFALRECPSVLEYKVQAGNSSLYNTPPCFSIYVMGLVLEWIKNNGGAAAMEKLSSIKSQTIYEIIDNSEGFYVCPVEPQNRSKMNIPFRIGNAKGDDALEKRFLDKALELNMLSLKGHRSVGGIRASLYNAVTIEDVQKLAAFMKKFLEMHQL

SEQ ID NO: 1191 - protein, 370 aa, synthetic construct
MDAPRQVVNFGPGPAKLPHSVLLEIQKELLDYKGVGISVLEMSHRSSDFAKIINNTENLVRELLAVPDNYKVIFLQGGGCGQFSAVPLNLIGLKAGRCADYVVTGAWSAKAAEEAKKFGTINIVHPKLGSYTKIPDPSTWNLNPDASYVYYCANETVHGVEFDFIPDVKGAVLVCDMSSNFLSKPVDVSKFGVIFAGAQKNVGSAGVTVVIVRDDLLGFALRECPSVLEYKVQAGNSSLYNTPPCFSIYVMGLVLEWIKNNGGAAAMEKLSSIKSQTIYEIIDNSQGFYVCPVEPKNRSKMNIPFRIGNAKGDDALEKRFLDKALELNMLSLKGHRSVGGIRASLYNAVTIEDVQKLAAFMKKFLEMHQL

SEQ ID NO: 1192 - protein, 370 aa, synthetic construct
MDAPRQVVNFGPGPAKLPHSVLLEIQKELLDYKGVGISVLEMSHRSSDFAKIINNTENLVRELLAVPDNYKVIFLQGGGCGQFSAVPLNLIGLKAGRCADYVVTGAWSAKAAEEAKKFGTINIVHPKLGSYTKIPDPSTWNLNPDASYVYYCANETVHGVEFDFIPDVKGAVLVCDMSSNFLSRPVDVSKFGVIFAGAQKNVGSAGVTVVIVRDDLLGFALRECPSVLEYKVQAGNSSLYNTPPCFSIYVMGLVLEWIKNNGGAAAMEKLSSIKSQTIYEIIDNSQGFYVCPVEPQNRSKMNIPFRIGNAKGDDALEKRFLDKALELNMLSLKGHRSVGGIRASLYNAVTIEDVQKLAAFMKKFLEMHQL

SEQ ID NO: 1193 - protein, 370 aa, synthetic construct
MDAPRQVVNFGPGPAKLSHSVLLEIQKELLDYKGVGISVLEMSHRSSDFAKIINNTENLVRELLAVPDNYKVIFLQGGGCGQFSAVPLNLIGLKAGRCADYVVTGAWSAKAAEEAKKFGTINIVHPKLGSYTKIPDPSTWNLNPDASYVYYCANETVHGVEFDFIPDVKGAVLVCDMSSNFLSKPVDVSKFGVIFAGAQKNVGSAGVTVVIVRDDLLGFALRECPSVLEYKVQAGNSSLYNTPPCFSIYVMGLVLEWIKNNGGAAAMEKLSSIKSQTIYEIIDNSQGFYVCPVEPQNRSKMNIPFRIGNAKGDDALEKRFLDKALELNMLSLKGHRSVGGIRASLYNAVTIEDVQKLAAFMKKFLEMHQL

SEQ ID NO: 1194 - protein, 370 aa, synthetic construct
MDAPRRVVNFGPGPAKLPHSVLLEIQKELLDYKGVGISVLEMSHRSSDFAKIINNTENLVRELLAVPDNYKVIFLQGGGCGQFSAVPLNLIGLKAGRCADYVVTGAWSAKAAEEAKKFGTINIVHPKLGSYTKIPDPSTWNLNPDASYVYYCANETVHGVEFDFIPDVKGAVLVCDMSSNFLSKPVDVSKFGVIFAGAQKNVGSAGVTVVIVRDDLLGFALRECPSVLEYKVQAGNSSLYNTPPCFSIYVMGLVLEWIKNNGGAAAMEKLSSIKSQTIYEIIDNSQGFYVCPVEPQNRSKMNIPFRIGNAKGDDALEKRFLDKALELNMLSLKGHRSVGGIRASLYNAVTIEDVQKLAAFMKKFLEMHQL

SEQ ID NO: 1195 - protein, 370 aa, synthetic construct
MDAPRQVVNFGPGPAKLPHSVLLEIQKELLDYKGVGISVLEMSHRSSDFAKIINNTENLVRELLAVPDNYKVIFLQGGGCGQFSAVPLNLIGLKAGRCADYVVTGAWSAKAAEEAKKFGTINIVHPKLGSYTKIPDPSTWNLNPDASYVYYCANETVHGVEFDFIPDVKGAVLVCDMSSNFLSKPVDVSKFGVIFAGAQKNVGSAGVTVVIVRDDLLGFALRECPSVLEYKVQAGNSSLYNTPPCFSIYVMGLVLEWIKNNGGAAAMEKLSSIKSQTIYEIIDNSQGFYVCPVEPQNRSKMNIPFRIGNAKGDDALEKRFLDKALELNMLSLKGHRSVGGIRASLYNAVTIEDVQKLAAYMKKFLEMHQL

SEQ ID NO: 1196 - protein, 370 aa, synthetic construct
MDAPRQVVNFGPGPAKLPHSVLLEIQKELLDYKGVGISVLEMSHRSSAFAKIINNTENLVRELLAVPDNYKVIFLQGGGCGQFSAVPLNLIGLKAGRCADYVVTGAWSAKAAEEAKKFGTINIVHPKLGSYTKIPDPSTWNLNPDASYVYYCANETVHGVEFDFIPDVKGAVLVCDMSSNFLSKPVDVSKFGVIFAGAQKNVGSAGVTVVIVRDDLLGFALRECPSVLEYKVQAGNSSLYNTPPCFSIYVMGLVLEWIKNNGGAAAMEKLSSIKSQTIYEIIDNSQGFYVCPVEPQNRSKMNIPFRIGNAKGDDALEKRFLDKALELNMLSLKGHRSVGGIRASLYNAVTIEDVQKLAAFMKKFLEMHQL

SEQ ID NO: 1197 - protein, 370 aa, synthetic construct
MDAPRQVVNFGPGPAKLPHSVLLEIQKELLDYKGVGISVLEMSHRSSDFAKIINNTENLVRELLAVPDNYKVIFLQGGGCGQFSAVPLNLIGLKAGRCADYVVTGAWSAKAAEEAKKFGTINIVHPKLGSYTKIPDPSTWNLNPDVSYVYYCANETVHGVEFDFIPDVKGAVLVCDMSSNFLSKPVDVSKFGVIFAGAQKNVGSAGVTVVIVRDDLLGFALRECPSVLEYKVQAGNSSLYNTPPCFSIYVMGLVLEWIKNNGGAAAMEKLSSIKSQTIYEIIDNSQGFYVCPVEPQNRSKMNIPFRIGNAKGDDALEKRFLDKALELNMLSLKGHRSVGGIRASLYNAVTIEDVQKLAAFMKKFLEMHQL

SEQ ID NO: 1198 - protein, 370 aa, synthetic construct
MDAPRQVVNFGPGPAKLPHSVLLEIQKELLDYKGVGISVLEMSHRSSDFAKIINNTENLVRELLAVPDNYKVIFLQGGGCGQFSAVPLNLIGLKAGRCADYVVTGAWSAKAAEEAKKFGTINIVHPKLGSYTKIPDPSTWNLNPDASYVYYCANETVHGVEFDFIPDVKGAVLVCDMSSNFLSKPVDVSKFGVIFAGAQKNVGSAGVTVVIVRDDLLGFALRECPSVLEYKVQAGNSSLYNTPPCFSIYVMGLVLEWIKNNGGAAAMEKLSSLKSQTIYEIIDNSQGFYVCPVEPQNRSKMNIPFRIGNAKGDDALEKRFLDKALELNMLSLKGHRSVGGIRASLYNAVTIEDVQKLAAFMKKFLEMHQL

SEQ ID NO: 1199 - protein, 370 aa, synthetic construct
MDAPRQVVNFGPGPAKLPHSVLLEIQKELLDYKGVGISVLEMSHRSSDFAKIINNTENLVRELLAVPDNYKVIFLQGGGCGQFSAVPLNLIGLKAGRCADYVVTGAWSAKAAEEAKKFGTINIVHPKLGSYTKIPDPSTWNLNPDASYVYYCANETVHGVEFDFIPDVKGAVLVCDMSSNFLSKPVDVSKFGVIFAGAQKNVGSAGVTVVIVRDDLLGFALRECPSVLEYKVQAGNSSLYNTPPCFSIYVMGLVLEWIKNNGGAAAMEKLSSIKSQTIYEIIDNSQGFYVCPVEPQNRSKMNIPFRIGNAKGDDALEKRFLDKALELNMLSVKGHRSVGGIRASLYNAVTIEDVQKLAAFMKKFLEMHQL

SEQ ID NO: 1200 - protein, 370 aa, synthetic construct
MDAPRQVVNFGPGPAKLPHSVLLEIQKELLDYKGVGISVLEMSHRSSDFAKIINNTENLVRELLAVPDNYKVIFLQGGGCGQFSAVPLNLIGLKAGRCADYVVTGAWSAKAAEEAKKFGTINIVHPKLGSYTKIPDPSTWDLNPDASYVYYCANETVHGVEFDFIPDVKGAVLVCDMSSNFLSKPVDVSKFGVIFAGAQKNVGSAGVTVVIVRDDLLGFALRECPSVLEYKVQAGNSSLYNTPPCFSIYVMGLVLEWIKNNGGAAAMEKLSSIKSQTIYEIIDNSQGFYVCPVEPQNRSKMNIPFRIGNAKGDDALEKRFLDKALELNMLSLKGHRSVGGIRASLYNAVTIEDVQKLAAFMKKFLEMHQL

SEQ ID NO: 1201 - protein, 370 aa, synthetic construct
MDAPRQVVNFGPGPAKLPHSVLLEIQKELLDYKGVGISVLEMSHRSSDFAKIINNTENLVRELLAVPDNYKVIFLQGGGCGQFSAVPLNLIGLKAGRCADYVVTGAWSAKAAEEAKKFGTINIVHPKLGSYTKIPDPSTWNLNPDASYVYYCANETVHGVEFDFIPDAKGAVLVCDMSSNFLSKPVDVSKFGVIFAGAQKNVGSAGVTVVIVRDDLLGFALRECPSVLEYKVQAGNSSLYNTPPCFSIYVMGLVLEWIKNNGGAAAMEKLSSIKSQTIYEIIDNSQGFYVCPVEPQNRSKMNIPFRIGNAKGDDALEKRFLDKALELNMLSLKGHRSVGGIRASLYNAVTIEDVQKLAAFMKKFLEMHQL

SEQ ID NO: 1202 - protein, 370 aa, synthetic construct
MDAPRQVVNFGPGPAKLPHSVLLEIQKELLDYKGVGISVLEMSHRSSDFAKIINNTENLVRELLAVPDNYKVIFLQGGGCGQFSAVPLNLIGLKAGRCADYVVTGAWSAKAAEEAKKFGTINIVHPKLGSYTKIPDPSTWNLNPDASYVYYCANETVHGVEFDFIPDVKGAVLVCDMSSNFLSKPVDVSKFGVIFAGAQKNVGSAGVTVVIVRDDLLGFALRECPSVLEYKGQAGNSSLYNTPPCFSIYVMGLVLEWIKNNGGAAAMEKLSSIKSQTIYEIIDNSQGFYVCPVEPQNRSKMNIPFRIGNAKGDDALEKRFLDKALELNMLSLKGHRSVGGIRASLYNAVTIEDVQKLAAFMKKFLEMHQL

SEQ ID NO: 1203 - protein, 370 aa, synthetic construct
MDAPRQVVNFGPGPAKLPHSVLLEIQKELLDYKGVGISVLEMSHRSSDFAKIVNNTENLVRELLAVPDNYKVIFLQGGGCGQFSAVPLNLIGLKAGRCADYVVTGAWSAKAAEEAKKFGTINIVHPKLGSYTKIPDPSTWNLNPDASYVYYCANETVHGVEFDFIPDVKGAVLVCDMSSNFLSKPVDVSKFGVIFAGAQKNVGSAGVTVVIVRDDLLGFALRECPSVLEYKVQAGNSSLYNTPPCFSIYVMGLVLEWIKNNGGAAAMEKLSSIKSQTIYEIIDNSQGFYVCPVEPQNRSKMNIPFRIGNAKGDDALEKRFLDKALELNMLSLKGHRSVGGIRASLYNAVTIEDVQKLAAFMKKFLEMHQL

SEQ ID NO: 1204 - protein, 370 aa, synthetic construct
MDAPRQVVNFGPGPAKLPHSVLLEIQKELLDYKGVGISVLEMSHRSSDFAKIINNTENRVRELLAVPDNYKVIFLQGGGCGQFSAVPLNLIGLKAGRCADYVVTGAWSAKAAEEAKKFGTINIVHPKLGSYTKIPDPSTWNLNPDASYVYYCANETVHGVEFDFIPDVKGAVLVCDMSSNFLSKPVDVSKFGVIFAGAQKNVGSAGVTVVIVRDDLLGFALRECPSVLEYKVQAGNSSLYNTPPCFSIYVMGLVLEWIKNNGGAAAMEKLSSIKSQTIYEIIDNSQGFYVCPVEPQNRSKMNIPFRIGNAKGDDALEKRFLDKALELNMLSLKGHRSVGGIRASLYNAVTIEDVQKLAAFMKKFLEMHQL

SEQ ID NO: 1205 - protein, 370 aa, synthetic construct
MDAPRQVVNFGPGPAKLPHSVLLEIQKELLDYKGVGISVLEMSHRSSDFAKIINNTENLVRELLAVPDNYKVIFLQGGGCGQFSAVPLNLIGLKAGRCADYVVTGAWSAKAAEEAKKFGTINIVHPKLGSYTKIPDPSTWNLNPDASYVYYCANETVHGVEFDFIPDVKGAVLVCDMSSNFLSKPVDVSKFGVIFAGAQKNVGSAGVTVVIVRDDLLGFALRECPSVLEYKVQAGNSSLYNTPPCFSIYVMGLVLEWIKNNGGAAAMEKLSSIKSQKIYEIIDNSQGFYVCPVEPQNRSKMNIPFRIGNAKGDDALEKRFLDKALELNMLSLKGHRSVGGIRASLYNAVTIEDVQKLAAFMKKFLEMHQL

SEQ ID NO: 1206 - protein, 370 aa, synthetic construct
MDAPRQVVNFGPGPAKLPHSVLLEIQKELLDYKGVGISVLEMSHRSSDFAKIINNTENLVRELLAVPDNYKVIFLQGGGCGQFSAVPLNLIGLKAGRCADYVVTGAWSAKAAEEAKKFGTINIVHPKLGSYTKIPDPSTWNLNPDASYVYYCANETVHGVEFDFIPDVKGAVLVCDMSSNFLSKPVDVSKFGVIFAGAQKNVGSAGVTVVIVRDDLLGFALRECPSVLEYKVQAGNSSLYNTPPCFSIYVMGLVLEWIKNNGGAAAMEKLSSIKSQTIYEIIDNSQGFYVCPVEPQNRSKMNIPFRIGNAKGDDALEKRFLDKALELDMLSLKGHRSVGGIRASLYNAVTIEDVQKLAAFMKKFLEMHQL

SEQ ID NO: 1207 - protein, 370 aa, synthetic construct
MDAPRQVVNFGPGPAKLPHSVLLEIQKELLDYKGVGISVLEMSHRSSDFAKIINNTENLVRELLAVPDNYKVIFLQGGGCGQFSAVPLNLIGLKAGRCADYVVTGAWSAKAAEEAKKFGTINIVHPKLGSYTKIPDPSTWNLNPDASYVYYCANETVHGVEFDFIPDVKGAVLVCDMSSNFLSKPVDVSKFGVIFAGAQKNVGSAGVTVVIVRDDLLGFALRECPSVLEYKVHAGNSSLYNTPPCFSIYVMGLVLEWIKNNGGAAAMEKLSSIKSQTIYEIIDNSQGFYVCPVEPQNRSKMNIPFRIGNAKGDDALEKRFLDKALELNMLSLKGHRSVGGIRASLYNAVTIEDVQKLAAFMKKFLEMHQL

SEQ ID NO: 1208 - protein, 370 aa, synthetic construct
MDAPRQVVNFGPGPAKLPHSVLLEIQKELLDYKGVGISVLEMSHRSSDFAKIINNTENLVRELLAVPDNYKVIFLQGGGCGQFSAVPLNLIGLKAGRCADYVVTGAWSAKAAEEAKKFGTINIVHPKLGSYTKIPDPSTWNLNPDASYVYYCANETVHGVEFDFIPDVKGAVLVCDMSSNFLSKPVDVSKFGVIFAGAQKNVGSAGVTVVIVRDDLLGFALRECPSVLEYKVQAGNSSLYNTPPCFSIYVMGLVLEWIKNNGGAAAMEKLSCIKSQTIYEIIDNSQGFYVCPVEPQNRSKMNIPFRIGNAKGDDALEKRFLDKALELNMLSLKGHRSVGGIRASLYNAVTIEDVQKLAAFMKKFLEMHQL

SEQ ID NO: 1209 - protein, 370 aa, synthetic construct
MDAPRQVVNFGPGPAKLPHSVLLEIQKELLDYKGVGISVLEMSHRSSDFAKSINNTENLVRELLAVPDNYKVIFLQGGGCGQFSAVPLNLIGLKAGRCADYVVTGAWSAKAAEEAKKFGTINIVHPKLGSYTKIPDPSTWNLNPDASYVYYCANETVHGVEFDFIPDVKGAVLVCDMSSNFLSKPVDVSKFGVIFAGAQKNVGSAGVTVVIVRDDLLGFALRECPSVLEYKVQAGNSSLYNTPPCFSIYVMGLVLEWIKNNGGAAAMEKLSSIKSQTIYEIIDNSQGFYVCPVEPQNRSKMNIPFRIGNAKGDDALEKRFLDKALELNMLSLKGHRSVGGIRASLYNAVTIEDVQKLAAFMKKFLEMHQL

SEQ ID NO: 1210 - protein, 370 aa, synthetic construct
MDAPRQVVNFGPGPAKLPHSVLLEIQKELLDYKGVGISVLEMSHRSSDFAKIINNTENLVRELLAVPDNYKVIFQQGGGCGQFSAVPLNLIGLKAGRCADYVVTGAWSAKAAEEAKKFGTINIVHPKLGSYTKIPDPSTWNLNPDASYVYYCANETVHGVEFDFIPDVKGAVLVCDMSSNFLSKPVDVSKFGVIFAGAQKNVGSAGVTVVIVRDDLLGFALRECPSVLEYKVQAGNSSLYNTPPCFSIYVMGLVLEWIKNNGGAAAMEKLSSIKSQTIYEIIDNSQGFYVCPVEPQNRSKMNIPFRIGNAKGDDALEKRFLDKALELNMLSLKGHRSVGGIRASLYNAVTIEDVQKLAAFMKKFLEMHQL

SEQ ID NO: 1211 - protein, 370 aa, synthetic construct
MDAPRQVVNFGPGPAKLPHSVLLEIQKELLDYKGVGISVLEMSHRSSDFAKIINNTENLVRELLAVPDNYKVIFLQGGGCGQFSAVPLNLIGLKAGRCADYVVTGAWSAKAAEEAKKFGTINIVHPKLGNYTKIPDPSTWNLNPDASYVYYCANETVHGVEFDFIPDVKGAVLVCDMSSNFLSKPVDVSKFGVIFAGAQKNVGSAGVTVVIVRDDLLGFALRECPSVLEYKVQAGNSSLYNTPPCFSIYVMGLVLEWIKNNGGAAAMEKLSSIKSQTIYEIIDNSQGFYVCPVEPQNRSKMNIPFRIGNAKGDDALEKRFLDKALELNMLSLKGHRSVGGIRASLYNAVTIEDVQKLAAFMKKFLEMHQL

SEQ ID NO: 1212 - protein, 370 aa, synthetic construct
MDAPRQVVNFGPGPAKLPHSVLLEIQKELLDYKGVGISVLEMSHRSSDFAKIINNTENLVRELLAVPDNYKVIFLQGGGCGQFSAVPLNLIGLKAGRCADYVVTGAWSAKAAEEAKKFGTINIVHPKLGSYTKIPDPSTWNLNPDASYVYYCANETVHGVEFDFIPDVKGAVLVCDMSSNFLSKPVDVSKFGVIFAGAQKNVGSAGVTVVIVRDDLLGFALRECPSVLEYKVQAGNSSLYNTPPCFSIYVMGLVLEWIKNNGGAAAMEKLSSIKSQTIYEIIDNSQGFYVCPVEPQNRSKMNIPFRIGNAKGDDALEKRFLDKALEFNMLSLKGHRSVGGIRASLYNAVTIEDVQKLAAFMKKFLEMHQL

SEQ ID NO: 1213 - protein, 370 aa, synthetic construct
MDAPRQVVNFGPGPAKLPHSVLLEIQKELLDYKGVGISVLEMSHRSSDFAKIINNTENLVRELLAVPDNYKVIFLQGGGCGQFSAVPLNLIGLKAGRCADYVVTGAWSAKAAEEAKKFGTINIVHPKLGSYTKIPDPSTWKLNPDASYVYYCANETVHGVEFDFIPDVKGAVLVCDMSSNFLSKPVDVSKFGVIFAGAQKNVGSAGVTVVIVRDDLLGFALRECPSVLEYKVQAGNSSLYNTPPCFSIYVMGLVLEWIKNNGGAAAMEKLSSIKSQTIYEIIDNSQGFYVCPVEPQNRSKMNIPFRIGNAKGDDALEKRFLDKALELNMLSLKGHRSVGGIRASLYNAVTIEDVQKLAAFMKKFLEMHQL

SEQ ID NO: 1214 - protein, 370 aa, synthetic construct
MDAPRQVVNFGPGPAKLPHSVLLEIQKELLDYKGVGISVLEMSHRSSDFAKIINNTENLVRELLAVPDNYKVIFLQGGGCGQFSAVPLNLIGLKAGRCADYVVTGAWSAKAAEEAKKFGTINIVHPKLGSYTKIPDPSTWNLNPDASYVYYCANETVHGVEFDFIPDVKGAVLVCDMSSNFLSKPVDVSKFGVIFAGAQKNVGSAGVTVVIVRDDLLGFALRECPSVLEYKVQAGNSSLYNTPPCFSIYVMGLVLEWIKNNGGAAAMEKLSSIKSQTIYEIIDNSQGFYVCPVEPQNRSKMNIPFRIGNAKGDDALEKRFLNKALELNMLSLKGHRSVGGIRASLYNAVTIEDVQKLAAFMKKFLEMHQL

SEQ ID NO: 1215 - protein, 370 aa, synthetic construct
MDAPRQVVNFGPGPAKLPHSVLLEIQKELLDYKGVGISVLEMSHRSSDFAKIINNTENLVRELLAVPDNYKVIFLQGGGCGQFSAVPLNLIGLKAGRCADYVVTGAWSAKAAEEAKKFGTINIVHPKLGSYTKIPDPITWNLNPDASYVYYCANETVHGVEFDFIPDVKGAVLVCDMSSNFLSKPVDVSKFGVIFAGAQKNVGSAGVTVVIVRDDLLGFALRECPSVLEYKVQAGNSSLYNTPPCFSIYVMGLVLEWIKNNGGAAAMEKLSSIKSQTIYEIIDNSQGFYVCPVEPQNRSKMNIPFRIGNAKGDDALEKRFLDKALELNMLSLKGHRSVGGIRASLYNAVTIEDVQKLAAFMKKFLEMHQL

SEQ ID NO: 1216 - protein, 370 aa, synthetic construct
MDAPRQVVNFGPGPAKLPHSVLLEIQKELLDYKGVGISVLEMSHRSSDFAKIINNTENLVRELLAVPDNYKVIFLQGGGCGQFSAVPLNLIGLKAGRCADYVVTGAWSAKAAEEAKKFGTINIVHPKLGSYTKIPDPSTWNLNPDASYVYYCANETVHGVEFDFIPDVKGAVLVCDMSSNFLSKPVDVSKFGVIFAGAQKNVGSAGVTVVIVRDDLLGFALRECPSVLEYKVQAGNSSLYNTPPCFSIYVMGLVLEWIKNNGGAAAMEKLSSIKSQTIYEIIDNSQGFYVCPVEPQNRSKMNIPFRIGNAKGDHALEKRFLDKALELNMLSLKGHRSVGGIRASLYNAVTIEDVQKLAAFMKKFLEMHQL

SEQ ID NO: 1217 - protein, 370 aa, synthetic construct
MDAPRQVVNFGPGPAKLPHSVLLEIQKELLDYKGVGISVLEMSHRSSDFAKIINNTENLVRELLAVPDNYKVIFLQGGGCGQFSAVPLNLIGLKAGRCADYVVTGAWSAKAAEEAKKFGTINIVHPKLGSYTKIPDPSTWNLNPDASYVYHCANETVHGVEFDFIPDVKGAVLVCDMSSNFLSKPVDVSKFGVIFAGAQKNVGSAGVTVVIVRDDLLGFALRECPSVLEYKVQAGNSSLYNTPPCFSIYVMGLVLEWIKNNGGAAAMEKLSSIKSQTIYEIIDNSQGFYVCPVEPQNRSKMNIPFRIGNAKGDDALEKRFLDKALELNMLSLKGHRSVGGIRASLYNAVTIEDVQKLAAFMKKFLEMHQL

SEQ ID NO: 1218 - protein, 370 aa, synthetic construct
MDAPRQVVNFGPGPAKLPHSVLLEIQKELLDYKGVGISVLEMSHRSSDFAKIINNTENLVRELLAVPDNYKVIFLQGGGCGQFSAVPLNLIGLKAGRCADYVVTGAWSAKAAEEAKKFGTINIVHPKLGSYTKIPDPSTWNRNPDASYVYYCANETVHGVEFDFIPDVKGAVLVCDMSSNFLSKPVDVSKFGVIFAGAQKNVGSAGVTVVIVRDDLLGFALRECPSVLEYKVQAGNSSLYNTPPCFSIYVMGLVLEWIKNNGGAAAMEKLSSIKSQTIYEIIDNSQGFYVCPVEPQNRSKMNIPFRIGNAKGDDALEKRFLDKALELNMLSLKGHRSVGGIRASLYNAVTIEDVQKLAAFMKKFLEMHQL

SEQ ID NO: 1219 - protein, 370 aa, synthetic construct
MDAPRQVVNFGPGPAKLPHSVLLEIQKELLDYKGVGISVLEMSHRSSDFAKIINNTENLVRELLAVPDNYKVIFLQGGGCGQFSAVPLNLIGLKAGRCADYVVTGAWSAKAAEEAKKFGTINIVHPKLGSYTKIPDPSTWNLNPDASYVYYCANETVHGVEFDFIPDVKGAVLVCDMSSNFLSKPVDVSKFGVIFAGAQKNVGSAGVTVVIVRDDLLGFALRECPSVLEYKVQAGNSSLYNTPPCFSIYVMGLVLEWIKNNGGAAAMEKLSSINSQTIYEIIDNSQGFYVCPVEPQNRSKMNIPFRIGNAKGDDALEKRFLDKALELNMLSLKGHRSVGGIRASLYNAVTIEDVQKLAAFMKKFLEMHQL

SEQ ID NO: 1220 - protein, 370 aa, synthetic construct
MDAPRQVVNFGPGPAKLPHSVLLEIQKELLDYKGVGISVLEMSHRSSDFAKIINNTENLVRELLAVPDNYKVIFLQGGGCGQFSAVPLNLIGLKAARCADYVVTGAWSAKAAEEAKKFGTINIVHPKLGSYTKIPDPSTWNLNPDASYVYYCANETVHGVEFDFIPDVKGAVLVCDMSSNFLSKPVDVSKFGVIFAGAQKNVGSAGVTVVIVRDDLLGFALRECPSVLEYKVQAGNSSLYNTPPCFSIYVMGLVLEWIKNNGGAAAMEKLSSIKSQTIYEIIDNSQGFYVCPVEPQNRSKMNIPFRIGNAKGDDALEKRFLDKALELNMLSLKGHRSVGGIRASLYNAVTIEDVQKLAAFMKKFLEMHQL

SEQ ID NO: 1221 - protein, 370 aa, synthetic construct
MDAPRQVVNFGPGPAKLPHSVLLEIQKELLDYKGVGISVFEMSHRSSDFAKIINNTENLVRELLAVPDNYKVIFLQGGGCGQFSAVPLNLIGLKAGRCADYVVTGAWSAKAAEEAKKFGTINIVHPKLGSYTKIPDPSTWNLNPDASYVYYCANETVHGVEFDFIPDVKGAVLVCDMSSNFLSKPVDVSKFGVIFAGAQKNVGSAGVTVVIVRDDLLGFALRECPSVLEYKVQAGNSSLYNTPPCFSIYVMGLVLEWIKNNGGAAAMEKLSSIKSQTIYEIIDNSQGFYVCPVEPQNRSKMNIPFRIGNAKGDDALEKRFLDKALELNMLSLKGHRSVGGIRASLYNAVTIEDVQKLAAFMKKFLEMHQL

SEQ ID NO: 1222 - protein, 370 aa, synthetic construct
MDAPRQVVNFGPGPAKLPHSVLLEIQKELLDYKGVGISVLEMSHRSSDFAKIINNTENLVRELLAVPDNYKVIFLQGGGCGQFSAVPLNLIGLKAGRCADYVVTGAWSAKAAEEAKKFGTINIVHPKLGSYTKIPDPSTWNLNPDASYVYYCANETVHGVEFDFIPDVKGAVLVCDMSSNFLSKPVDVSKFGVIFAGAQKNVGSAGVTVVIVRDDLLGFALRECPSVLEYKVQSGNSSLYNTPPCFSIYVMGLVLEWIKNNGGAAAMEKLSSIKSQTIYEIIDNSQGFYVCPVEPQNRSKMNIPFRIGNAKGDDALEKRFLDKALELNMLSLKGHRSVGGIRASLYNAVTIEDVQKLAAFMKKFLEMHQL

SEQ ID NO: 1223 - protein, 370 aa, synthetic construct
MDAPRQVVNFGPGPAKLPHSVLLEIQKELLDYKGVGISVLEMSHRSSDFAKIINNTENLVRELLAVPDNYKVIFLQGGGCGQFSAVPLNLIGLKAGRCADYVVTGAWSAKAAEEAKKFGTINIVHPKLGSYTKIPDPSTWNLNPDASYVYYCANETVHGVEFDFIPDVKGAVLVCDMSSNFLSEPVDVSKFGVIFAGAQKNVGSAGVTVVIVRDDLLGFALRECPSVLEYKVQAGNSSLYNTPPCFSIYVMGLVLEWIKNNGGAAAMEKLSSIKSQTIYEIIDNSQGFYVCPVEPQNRSKMNIPFRIGNAKGDDALEKRFLDKALELNMLSLKGHRSVGGIRASLYNAVTIEDVQKLAAFMKKFLEMHQL

SEQ ID NO: 1224 - protein, 370 aa, synthetic construct
MDAPRQVVNFGPGPAKLPHSVLLEIQKELLDYKGVGISVLEMSHRSSDFAKIINNTESLVRELLAVPDNYKVIFLQGGGCGQFSAVPLNLIGLKAGRCADYVVTGAWSAKAAEEAKKFGTINIVHPKLGSYTKIPDPSTWNLNPDASYVYYCANETVHGVEFDFIPDVKGAVLVCDMSSNFLSKPVDVSKFGVIFAGAQKNVGSAGVTVVIVRDDLLGFALRECPSVLEYKVQAGNSSLYNTPPCFSIYVMGLVLEWIKNNGGAAAMEKLSSIKSQTIYEIIDNSQGFYVCPVEPQNRSKMNIPFRIGNAKGDDALEKRFLDKALELNMLSLKGHRSVGGIRASLYNAVTIEDVQKLAAFMKKFLEMHQL

SEQ ID NO: 1225 - protein, 370 aa, synthetic construct
MDAPRQVVNFGPGPAKLPHSVLLEIQKELLDYKGVGISVLEMSHRSSDFAKIINNTENLVRELLAVPDNYKVIFLQGGGCGQFSAVPLNLIGLKAGRCADYVVTGAWSAKAAEEAKKFGTINIVHPKLGSYTKIPDPSTWNLNPDASYVYYCANETVHGVEFDFIPDVKGAVLVCDMSSNFVSKPVDVSKFGVIFAGAQKNVGSAGVTVVIVRDDLLGFALRECPSVLEYKVQAGNSSLYNTPPCFSIYVMGLVLEWIKNNGGAAAMEKLSSIKSQTIYEIIDNSQGFYVCPVEPQNRSKMNIPFRIGNAKGDDALEKRFLDKALELNMLSLKGHRSVGGIRASLYNAVTIEDVQKLAAFMKKFLEMHQL

SEQ ID NO: 1226 - protein, 370 aa, synthetic construct
MDAPRQVVNFGPGPAKLPHSVLLEIQKELLDYKGVGISVLEMSHRSSDFAKIINNTENLVRELLAVPDNYKVIFLQGGGCGQFSAVPLNLIGLKAGRCADYVVTGAWSAKAAEEAKKFGTINIVHPKLGSYTKIPDPSTWNLNPDASYVYYCANETVHGVEFDFIPDVKGAVLVCDMSSNFLSKPVDVSKFGVIFAGAQKNVGSAGVTVVIVRDDLLGFALRECPSVLEYKVQAGNSSLYNTPPCFSIYVMGLVLEWIKNNGGAAAMEKLSSIKSQTIYEIIDNSQGFYVCPVKPQNRSKMNIPFRIGNAKGDDALEKRFLDKALELNMLSLKGHRSVGGIRASLYNAVTIEDVQKLAAFMKKFLEMHQL

SEQ ID NO: 1227 - protein, 370 aa, synthetic construct
MDAPRQVVNFGPGPAKLPHSVLLEIQKELLDYKGVGISVLEMSHRSSDFAKIINNTENLVRELLAVPDNYKVIFLQGGGCGQFSAVPLNLIGLKAGRCADYVVTGAWSAKAAEEAKKFGTINIVHPKLGSYTKIPDPSTWNLNPDASYVYYCANETVHGVEFDFIPDVKGAVLVCDMSSNFLSKPVDVSKFGVIFAGAQKNVGSAGVTVVIVRDDLLGFALRECPSVLEYKVQAGNSSLYNTPPCFSIYVMGLVLEWIKNNGGAAAMEKLSSIKSQTIYEIIDNSQGFYVCPVEPQNRSKKNIPFRIGNAKGDDALEKRFLDKALELNMLSLKGHRSVGGIRASLYNAVTIEDVQKLAAFMKKFLEMHQL

SEQ ID NO: 1228 - protein, 370 aa, synthetic construct
MDAPRQVVNFGHGPAKLPHSVLLEIQKELLDYKGVGISVLEMSHRSSDFAKIINNTENLVRELLAVPDNYKVIFLQGGGCGQFSAVPLNLIGLKAGRCADYVVTGAWSAKAAEEAKKFGTINIVHPKLGSYTKIPDPSTWNLNPDASYVYYCANETVHGVEFDFIPDVKGAVLVCDMSSNFLSKPVDVSKFGVIFAGAQKNVGSAGVTVVIVRDDLLGFALRECPSVLEYKVQAGNSSLYNTPPCFSIYVMGLVLEWIKNNGGAAAMEKLSSIKSQTIYEIIDNSQGFYVCPVEPQNRSKMNIPFRIGNAKGDDALEKRFLDKALELNMLSLKGHRSVGGIRASLYNAVTIEDVQKLAAFMKKFLEMHQL

SEQ ID NO: 1229 - protein, 370 aa, synthetic construct
MDAPRQVVNFGPGPAKLPHSVLLEIQKELLDYKGVGISVLEMSHRSSDFAKIINNTENLVRELLAVPDNYKVIFLQGGGCGQFSAVPLNLIGLKAGRCADYVVTGAWSAKAAEEAKKFGTINIVHPKLGSYTKIPDPSTWNLNPDASYVYYCANETVHGVEFDFIPDVKGAVLVCDMSSNFLSKPVDVSKFGVIFAGAQKNVGSAGVTVVIVRDDLLGFALRECPSVLEYKVQAGNSSLYNTPPCFSIYVMGLVLEWIKNNGGAAAMEKLSSIKSQTIYEIIDNSQGFYVCPVEPQNRSKMNIPFRIGNAKGDDALEKRFLDKALEVNMLSLKGHRSVGGIRASLYNAVTIEDVQKLAAFMKKFLEMHQL

SEQ ID NO: 1230 - protein, 370 aa, synthetic construct
MDAPRQVVNFGPGPAKLPHSVLLEIQKELLDYKGVGISVLEMSHRSSDFAKIINNTENLVRELLAVPDNYKVIFLQGGGCGQFSAVPLNLIGLKAGRCADYVVTGAWSAKAAEEAKKFGTINIVHPKLGSYTKIPDPSTWNLNPDASYVYYCANETVHGVEFDFIPDVKGAVLVCDMSSNFLSKPVDVSKFGVIFAGAQKNVGSAGVTVVIVRDDLLGFALRECPSVLEYKVQAGNSSLYNTPPCFSIYVMGLVLEWIKNNGGAAAMEKLSSIKSQTIYEIIDNSQGFYVCPVEPQNRSKMNIPFRIGNAKGDDALEKRFLDKALELNMLSLKGHRSVGGIRASLYNAVTIEDVQKLAAFMTKFLEMHQL

SEQ ID NO: 1231 - protein, 370 aa, synthetic construct
MDAPRQVVNFGPGPAKLPHSVLLEIQKELLDYKGVGISVLEMSHRSSDFAKIINNTENLVRELLAVPDNYKVIFLQGGGCGQFSAVPLNLLGLKAGRCADYVVTGAWSAKAAEEAKKFGTINIVHPKLGSYTKIPDPSTWNLNPDASYVYYCANETVHGVEFDFIPDVKGAVLVCDMSSNFLSKPVDVSKFGVIFAGAQKNVGSAGVTVVIVRDDLLGFALRECPSVLEYKVQAGNSSLYNTPPCFSIYVMGLVLEWIKNNGGAAAMEKLSSIKSQTIYEIIDNSQGFYVCPVEPQNRSKMNIPFRIGNAKGDDALEKRFLDKALELNMLSLKGHRSVGGIRASLYNAVTIEDVQKLAAFMKKFLEMHQL

SEQ ID NO: 1232 - protein, 370 aa, synthetic construct
MDAPRQVVNFGPGPAKLPHSVLLEIQKELLDYKGVGISVLEMSHRSSDFAKIINNTENLVRELLAVPDNYKVIFLQGGGCAQFSAVPLNLIGLKAGRCADYVVTGAWSAKAAEEAKKFGTINIVHPKLGSYTKIPDPSTWNLNPDASYVYYCANETVHGVEFDFIPDVKGAVLVCDMSSNFLSKPVDVSKFGVIFAGAQKNVGSAGVTVVIVRDDLLGFALRECPSVLEYKVQAGNSSLYNTPPCFSIYVMGLVLEWIKNNGGAAAMEKLSSIKSQTIYEIIDNSQGFYVCPVEPQNRSKMNIPFRIGNAKGDDALEKRFLDKALELNMLSLKGHRSVGGIRASLYNAVTIEDVQKLAAFMKKFLEMHQL

SEQ ID NO: 1233 - protein, 370 aa, synthetic construct
MDAPRQVVNFGPGPAKLPHSVLLEIQKELLDYKGVGISVLEMSHRSSDFAKIINNTENLVRELLAVPDNYKVTFLQGGGCGQFSAVPLNLIGLKAGRCADYVVTGAWSAKAAEEAKKFGTINIVHPKLGSYTKIPDPSTWNLNPDASYVYYCANETVHGVEFDFIPDVKGAVLVCDMSSNFLSKPVDVSKFGVIFAGAQKNVGSAGVTVVIVRDDLLGFALRECPSVLEYKVQAGNSSLYNTPPCFSIYVMGLVLEWIKNNGGAAAMEKLSSIKSQTIYEIIDNSQGFYVCPVEPQNRSKMNIPFRIGNAKGDDALEKRFLDKALELNMLSLKGHRSVGGIRASLYNAVTIEDVQKLAAFMKKFLEMHQL

SEQ ID NO: 1234 - protein, 370 aa, synthetic construct
MDAPRQVVNFGPGPAKLPHSVLLEIQKELLDYKGVGISVLEMSHRSSDFAKIINNTENLVRELLAVPDNYKVIFLQGGGCGQFSAVPLNLIGLKAGRCADYVVTGAWSAKAAEEAKKFGTINIVHPKLGSYTKIPDPSTWNLNPDASYVYYCANETVHGVEFDFIPDVKGAVLVCDMSSNFLSKPVDVSKFGVIFAGAQKNVGSAGVTVVIVRDDLLGFALRECPSVLEYKVQAGNSSLYNTPPCFSIYVMGLVLEWIKNNGGAAAMEKLSSIKSQTIYEIIDNSQGFYVCPVEPQNRSKMNIPFRIGNAKGDDALEKRFLDKALELNMLSLKGHRSVGGIRASLYNAVTSEDVQKLAAFMKKFLEMHQL

SEQ ID NO: 1235 - protein, 370 aa, synthetic construct
MDAPRQVVNFGPGPAKLPHSVLLEIQKELLDYKGVGISVLEMSHRSSDFAKIINNTENLVRELLAVPDNYKVIFLQGGGCGQFSAVPLNLIGLKAGRCADYVVTGAWSAKAAEEAKKFGTINIVHPKLGSYTKIPDPSTWNLNPDASYVYYCANETVHGVEFDFIPDVKGAVLVCDMSSNFLSKPVDVSKFGVIFAGAQKNVGSAGVTVVIVRDDLLGFALRECPSVLEYKVQAGNSSLYNTPPCFSIYVMGLVLEWIKNNGGAAAMEKLSSIKSQTIYEIIDNSQGFYVCPVEPQNRSKMNIPFRIGNAKGDDALEKRFLDKALELNMLSLKGHRSVGGIRASLYNAVTIEDVQKLAAFMQKFLEMHQL

SEQ ID NO: 1236 - protein, 370 aa, synthetic construct
MDAPRQVVNFGPGPAKLPHSVLLEIQKELLDYKGVGISVHEMSHRSSDFAKIINNTENLVRELLAVPDNYKVIFLQGGGCGQFSAVPLNLIGLKAGRCADYVVTGAWSAKAAEEAKKFGTINIVHPKLGSYTKIPDPSTWNLNPDASYVYYCANETVHGVEFDFIPDVKGAVLVCDMSSNFLSKPVDVSKFGVIFAGAQKNVGSAGVTVVIVRDDLLGFALRECPSVLEYKVQAGNSSLYNTPPCFSIYVMGLVLEWIKNNGGAAAMEKLSSIKSQTIYEIIDNSQGFYVCPVEPQNRSKMNIPFRIGNAKGDDALEKRFLDKALELNMLSLKGHRSVGGIRASLYNAVTIEDVQKLAAFMKKFLEMHQL

SEQ ID NO: 1237 - protein, 370 aa, synthetic construct
MDAPRQVVNFGPGPAKLPHSVLLEIQKELLDYKGVGISVLEMSHRSSDFAKIINNTENLVRELLAVPDNYKVIFLQGGGCGQFSAVPLNLIGLKAGRCADYVVTGAWSAKAAEEAKKFGTINIVHPKLGSYTKIPDPSTWNLNPDASYVYYCANETVHGVEFDFIPDVKGAVLVCDMSSNFLSKPVDVSKFGVIFAGAQKNVGSAGVTVVIVRDDLLGFALRECPSVLEYKVQAGNSSLYNTPPCFSIYVMGLVLEWIKNNGGAAAMEKLSSIKSQTIYEIIDNSQGFYVCPVEPQNRSKMNIPFRIGNAKGDDALEKRFLDKALELNMVSLKGHRSVGGIRASLYNAVTIEDVQKLAAFMKKFLEMHQL

SEQ ID NO: 1238 - protein, 370 aa, synthetic construct
MDAPRQVVNFGPGPAKLPHSVLLEILKELLDYKGVGISVLEMSHRSSDFAKIINNTENLVRELLAVPDNYKVIFLQGGGCGQFSAVPLNLIGLKAGRCADYVVTGAWSAKAAEEAKKFGTINIVHPKLGSYTKIPDPSTWNLNPDASYVYYCANETVHGVEFDFIPDVKGAVLVCDMSSNFLSKPVDVSKFGVIFAGAQKNVGSAGVTVVIVRDDLLGFALRECPSVLEYKVQAGNSSLYNTPPCFSIYVMGLVLEWIKNNGGAAAMEKLSSIKSQTIYEIIDNSQGFYVCPVEPQNRSKMNIPFRIGNAKGDDALEKRFLDKALELNMLSLKGHRSVGGIRASLYNAVTIEDVQKLAAFMKKFLEMHQL

SEQ ID NO: 1239 - protein, 370 aa, synthetic construct
MDAPRQVVNFGPGPAKLPHSVLLEIQKELLDYKGVGISVLEMSHRSSDFAKIINNTENLVRELLAVPDNYKVIFLQGGGCGQFSAVPLNLIGLKAGRCADYVVTGAWSAKAAEEAKKFGTINIVHPKLGSYTKIPDPSTWNLNPDASYVYYCANETVHGVEFDFIPDVKGAVLVCDMSSNFLSKPVDVSKFGVIFAGAQKNVGSAGVTVVIVRDDLLGFALRECPSVLEYKVQAGNSSLYNTPPCFSIYVMGLVLEWIKNNGGAAAMEKLSSIKSQTIYEIIDNSQGFYVCPVEPQNRSKMNIPFRIGYAKGDDALEKRFLDKALELNMLSLKGHRSVGGIRASLYNAVTIEDVQKLAAFMKKFLEMHQL

SEQ ID NO: 1240 - protein, 370 aa, synthetic construct
MDAPRQVVNFGPGPAKLPHSVLLEIQKELLDYKGVGISVLEMSHRSSDFAKIINNTENLVRELLAVPDNYKVIFLQGGGCGQFSAVPLNLIGLKAGRCADYVVTGAWSAKAAEEAKKFGTINIVHPKLGSYTKIPDPSTWNLNPDASYVYYCANETVHGVEFDFIPDVKGAVLVCDMSSNFLSKPVDVSKFGVIFAGAQKNVGSAGVTVVIARDDLLGFALRECPSVLEYKVQAGNSSLYNTPPCFSIYVMGLVLEWIKNNGGAAAMEKLSSIKSQTIYEIIDNSQGFYVCPVEPQNRSKMNIPFRIGNAKGDDALEKRFLDKALELNMLSLKGHRSVGGIRASLYNAVTIEDVQKLAAFMKKFLEMHQL

SEQ ID NO: 1241 - protein, 370 aa, synthetic construct
MDAPRQVVNFGPGPAKLPHSVLLEIQKELLDYKGVGISVLEMSHRSSDFAKIINNTENLVRELLAVPDNYKVIFLQGGGCGQFSAVPLNLIGLKAGRCADYVVTGAWSAKAAEEAKKFGTINIVHPKLGSYTKIPDPSTWNLNPDASYVYYCANETVHGVEFDFIPDVKGAVLVCDMSSNFLSKPVDVSKFGVIFAGAQKNVGSAGVTVVIVRDDLLGFALRECPSVLEYKVQAGNSSLYNTPPCFSIYVMGLVLEWIKNNGGAADMEKLSSIKSQTIYEIIDNSQGFYVCPVEPQNRSKMNIPFRIGNAKGDDALEKRFLDKALELNMLSLKGHRSVGGIRASLYNAVTIEDVQKLAAFMKKFLEMHQL

SEQ ID NO: 1242 - protein, 370 aa, synthetic construct
MDAPRQVVNFGPGPAKLPHSVLLEIQKELLDYKGVGISVLEMSHRSSDFAKIINNTENLVRELLAVPDNYKVIFLQGGGCGQFSAVPLNLIGLKAGRCADYVVTGAWSAKAAEEAKKFGTINIVHPKLGSYTKIPDPSTWNLNPDASYVYYCANETVHGVEFDFIPDVKGAVLVCDMSSNFLSKPVDVSKFGVIFAGAQKNVGSAGVTVVIVRDDLLGFALRECPSVLEYKVQAGNSSLYNTPPCFSIYVMGLVLEWIKNNGGAAAMEKLSSIKSQTIYEIIDNSQGFYVCPVEPQNRSKMNIPFRISNAKGDDALEKRFLDKALELNMLSLKGHRSVGGIRASLYNAVTIEDVQKLAAFMKKFLEMHQL

SEQ ID NO: 1243 - protein, 370 aa, synthetic construct
MDAPRQVVNFGPGPAKLPHSVLLEIQKELLDYKGVGISVLEMSHRSSDFAKIINNTENLVRELLAVPDNYKVIFLQGGGCGQFSAVPLNLIGLKAGRCADYVVTGAWSAKAAEEAKKFGTINIVHPKLGSYTKIPDPSTWNLNPDASYVYYCANETVHGVEFDFIPDVKGAVLVCDMSSNFLSKPVDVSKFGVIFAGAQKNVGSAGVTVVIVRDDLLGFALRECPSVLEYKVQAGNSSLYNTPPCFSIYVMGLVLEWIKNNGGAAAMEKLSSIKSQTIYEIIDNSQGFYVCPVEPQNRSKMNIPFRIGNAKGDDALEKRFLDKALELNMLSLKGHRSVGGIRASLYNAVTIEDVQKLAACMKKFLEMHQL

SEQ ID NO: 1244 - protein, 370 aa, synthetic construct
MDAPRQVVNFGPGPAKLPHSVLLEIQKELLDYKGVGISVLEMSHRSSDFAKIINNTENLVRELLAVPDNYKVIFLQGGGCGQFSAVPLNLIGLKAGRCADYVVTGAWSAKGAEEAKKFGTINIVHPKLGSYTKIPDPSTWNLNPDASYVYYCANETVHGVEFDFIPDVKGAVLVCDMSSNFLSKPVDVSKFGVIFAGAQKNVGSAGVTVVIVRDDLLGFALRECPSVLEYKVQAGNSSLYNTPPCFSIYVMGLVLEWIKNNGGAAAMEKLSSIKSQTIYEIIDNSQGFYVCPVEPQNRSKMNIPFRIGNAKGDDALEKRFLDKALELNMLSLKGHRSVGGIRASLYNAVTIEDVQKLAAFMKKFLEMHQL

SEQ ID NO: 1245 - protein, 370 aa, synthetic construct
MDAPRQVVNFGPGPAKLPHSVLLEIQKELLDYKGVGISVLEMSHRSSDFAKIINNTENLVRELLAVPHNYKVIFLQGGGCGQFSAVPLNLIGLKAGRCADYVVTGAWSAKAAEEAKKFGTINIVHPKLGSYTKIPDPSTWNLNPDASYVYYCANETVHGVEFDFIPDVKGAVLVCDMSSNFLSKPVDVSKFGVIFAGAQKNVGSAGVTVVIVRDDLLGFALRECPSVLEYKVQAGNSSLYNTPPCFSIYVMGLVLEWIKNNGGAAAMEKLSSIKSQTIYEIIDNSQGFYVCPVEPQNRSKMNIPFRIGNAKGDDALEKRFLDKALELNMLSLKGHRSVGGIRASLYNAVTIEDVQKLAAFMKKFLEMHQL

SEQ ID NO: 1246 - protein, 370 aa, synthetic construct
MDAPRQVVNFGPGPAKLPHSVLLEIQKELLDYKGVGISVLEMSHRSSDFAKIINNTENLVRELLAVPDNYKVIFLQGGGCGQFSAVPLNLIGLKAGRCADYVVTGAWSAKAAEEAKKFGTINIVHPKLGSYTKIPDPSTWNLNPDASYVYYCANETVHGVEFDFIPDVKGAVLVCDMSSNFLSKPVDVSKFGVIFAGAQKNVGSAGVTVVIVRDDLLGFALRECPSVLEYKVQAGNSSLYNTPPCFNIYVMGLVLEWIKNNGGAAAMEKLSSIKSQTIYEIIDNSQGFYVCPVEPQNRSKMNIPFRIGNAKGDDALEKRFLDKALELNMLSLKGHRSVGGIRASLYNAVTIEDVQKLAAFMKKFLEMHQL

SEQ ID NO: 1247 - protein, 370 aa, synthetic construct
MDAPRQVVNFGPGPAKLPHSVLLEIQKELLDYKGVGISVLEMSHRSSDFDKIINNTENLVRELLAVPDNYKVIFLQGGGCGQFSAVPLNLIGLKAGRCADYVVTGAWSAKAAEEAKKFGTINIVHPKLGSYTKIPDPSTWNLNPDASYVYYCANETVHGVEFDFIPDVKGAVLVCDMSSNFLSKPVDVSKFGVIFAGAQKNVGSAGVTVVIVRDDLLGFALRECPSVLEYKVQAGNSSLYNTPPCFSIYVMGLVLEWIKNNGGAAAMEKLSSIKSQTIYEIIDNSQGFYVCPVEPQNRSKMNIPFRIGNAKGDDALEKRFLDKALELNMLSLKGHRSVGGIRASLYNAVTIEDVQKLAAFMKKFLEMHQL

SEQ ID NO: 1248 - protein, 370 aa, synthetic construct
MDAPRQVVNFGPGPAKLPHSVLLEIQKELLDYKGVGISVLEMSHRSSDFAKIINNTENLVRELLAVPDNYKVIFLQGGGCGQFSAVPLNLIGLKAGRCADYVVTGAWSAKAAEEAKKFGTINIVHPKLGSYTKIPDPSTWNLNPDASYVYYCANETVHGVEFDFIPDVKGAVLVCDMSSNFLSKPVDVSKFGVIFAGAQKNVGSAGVTVVIVRDDLLGFALRECPSVLEYKVQAGNSSLYNTPPCFSIYVMGLVLEWIKNNGGAAAMEKLSSIKSQTIYEIIDNSQGFYVCPVEPQNRSKMNIPFRIGNAKGDDALEKRFLDKALELNMLPLKGHRSVGGIRASLYNAVTIEDVQKLAAFMKKFLEMHQL

SEQ ID NO: 1249 - protein, 370 aa, synthetic construct
MDAPRQVVNFGPGPAKLPHSVLLEIQKELLDYKGVGISVLEMSHRSSDFAKIINNTENLVRELLAVPDNYKVIFLQGGGCGQFSAVPLNLIGLKAGRCADYVVTGAWSAKAAEEAKKFGTINIVHPKLGSYTKIPDPSTWNLNPDASYVYYCANETVHGVEFDFIPDVKGAVLVCDMSSNFLSKPVDVSKFGVIFAGAQKNVGSAGVTVVIVRDDLLGFALRECPSVLEYKVQAGNSSLYNTPPCFSIYVMGLVLEWIKNNGGAAAMEKLSSIKSQTIYEIIDNSQGFYVCPVEPQNRSKMNIPFRIGNAKGDDALEKRFLDKALELNMLSLKGHRSVGGIRASLYNAVTIEDVQKLAAFMKQFLEMHQL

SEQ ID NO: 1250 - protein, 370 aa, synthetic construct
MDAPRQVVNFGPGPAKLPHSVLLEIQKELLDYKGVGISVLEMSHRSSDFAKIINNTENLVRELLAVPDNYKVIFLQGGGCGQFSAVPLNLIGLKAGRCADYVVTGAWSAKAAEEAKKFGTINIVHPKLGSYTKIPDPSTWNLNPDASYVYYCANETVHGVEFDFIPDVKGAVLVCDMSSNFLSKPVDVSKFGVIFAGAQKNVGSAGVTVVIVRDDLLGFALRECPSVLEYKVQAGNSSLYNTPPCFSIYVMGLVLEWIKNNGGAAAMEKLSSIKSQTIYEIIDNSQGFYVCPVEPQNRSKMNIPFRIGNAKGDDALEKRFLDKALALNMLSLKGHRSVGGIRASLYNAVTIEDVQKLAAFMKKFLEMHQL

SEQ ID NO: 1251 - protein, 370 aa, synthetic construct
MDAPRQVVNFGPGPAKLPHSVLLEIQKELLDYKGVGISVLEMSHRSSDFAKIINNTENLVRELLAVPDNYKVIFLQGGGCGQFSAVPLNLIGLKAGRCADYVVTGAWSAKAAEEAKKFGTINIVHPKLGSYTKIPDPSTWNLNPDASYVYYCANETVHGVEFDFIPDVKGAVLVCDMSSNFLSKPVDVSKFGVIFAGAQKNVGSAGVTVVIVRDDLLGFALRECPSVLEYKVQAGNSSLYNTPPCFSIYVMGLVLEWIKNNGGAAAMEKLSSIKSQTIYEIIDNSQGFYVCPVEPQNRSKMNIPFRIGNAKGDDALEKRFLDKALELNMLSLKGHRSVGGIRASLYNAVTIEDVQKLAAFMNKFLEMHQL

SEQ ID NO: 1252 - protein, 370 aa, synthetic construct
MDAPRQVVNFGPGPAKLPHSVLLEIQKELLDYNGVGISVLEMSHRSSDFAKIINNTENLVRELLAVPDNYKVIFLQGGGCGQFSAVPLNLIGLKAGRCADYVVTGAWSAKAAEEAKKFGTINIVHPKLGSYTKIPDPSTWNLNPDASYVYYCANETVHGVEFDFIPDVKGAVLVCDMSSNFLSKPVDVSKFGVIFAGAQKNVGSAGVTVVIVRDDLLGFALRECPSVLEYKVQAGNSSLYNTPPCFSIYVMGLVLEWIKNNGGAAAMEKLSSIKSQTIYEIIDNSQGFYVCPVEPQNRSKMNIPFRIGNAKGDDALEKRFLDKALELNMLSLKGHRSVGGIRASLYNAVTIEDVQKLAAFMKKFLEMHQL

SEQ ID NO: 1253 - protein, 370 aa, synthetic construct
MDAPRQVVNFGPGPAKLPHSVLLEIQKELLDYKGVGISVLEMSHRSSDFAKIINNTENLVRELLAVPDNYKVIFLQGGGCGQFSAVPLNLIGLKAGRCADYVVTGAWSAKAAEEAKKFGTINIVHPKLGSYTKIPDPSTWNLNPDASYVYYCANETVHGVEFDFIPDVKGAVLVCDMSSNFLSKPVDVSKFGVIFAGAQKNVGSAGVTVVIVRDDLLGFALRECPSVLVYKVQAGNSSLYNTPPCFSIYVMGLVLEWIKNNGGAAAMEKLSSIKSQTIYEIIDNSQGFYVCPVEPQNRSKMNIPFRIGNAKGDDALEKRFLDKALELNMLSLKGHRSVGGIRASLYNAVTIEDVQKLAAFMKKFLEMHQL

SEQ ID NO: 1254 - protein, 370 aa, synthetic construct
MDAPRQVVNFGPGPAKLPHSVLLEIQKELLDYKGVGISVLEMSHRSSDFAKIINNTENLVRELLAVPDNYKVIFLQGGGCGQFSAVPLNLIGLKAGRCADYVVTGAWSAKAAEEAKKFGTINIVHPKLGSYTKIPDPSTWNLNPDASYVYYCANETVHGVEFDFIPDVKGAVLVCDMSSNFLSKPVDVSKFGVIFAGAQKNVGSAGVTVVIVRDDLLGFALRECPSVLEYKVQAGNSSLYNTPPCFSIDVMGLVLEWIKNNGGAAAMEKLSSIKSQTIYEIIDNSQGFYVCPVEPQNRSKMNIPFRIGNAKGDDALEKRFLDKALELNMLSLKGHRSVGGIRASLYNAVTIEDVQKLAAFMKKFLEMHQL

SEQ ID NO: 1255 - protein, 370 aa, synthetic construct
MDAPRQVVNFGPGPAKLPHSVLLEIQKELLDYKGVGISVLEMSHRSSDFAKIINNTENLVRELLAVPDNYKVIFLQGGGCGQFSAVPLNLIGLKAGRCADYVVTGAWSAKAAEEAKKFGTINIVHPKLGSYTKIPDPSTWNLNPDASYVYYCANETVHGVEFDFIPDVKGAVLVCDMSSNFLSKPVDVSKFGVIFAGAQKNVGSAGVTVVIVRDDLLGFALRECPSVLEYKVQAGNSSLYNTPPCFSIYVMGLVLEWIKNKGGAAAMEKLSSIKSQTIYEIIDNSQGFYVCPVEPQNRSKMNIPFRIGNAKGDDALEKRFLDKALELNMLSLKGHRSVGGIRASLYNAVTIEDVQKLAAFMKKFLEMHQL

SEQ ID NO: 1256 - protein, 370 aa, synthetic construct
MDAPRQVVNFGPGPAKLPHSVLLEIQNELLDYKGVGISVLEMSHRSSDFAKIINNTENLVRELLAVPDNYKVIFLQGGGCGQFSAVPLNLIGLKAGRCADYVVTGAWSAKAAEEAKKFGTINIVHPKLGSYTKIPDPSTWNLNPDASYVYYCANETVHGVEFDFIPDVKGAVLVCDMSSNFLSKPVDVSKFGVIFAGAQKNVGSAGVTVVIVRDDLLGFALRECPSVLEYKVQAGNSSLYNTPPCFSIYVMGLVLEWIKNNGGAAAMEKLSSIKSQTIYEIIDNSQGFYVCPVEPQNRSKMNIPFRIGNAKGDDALEKRFLDKALELNMLSLKGHRSVGGIRASLYNAVTIEDVQKLAAFMKKFLEMHQL

SEQ ID NO: 1257 - protein, 370 aa, synthetic construct
MDAPRQVVNFGPGPAKLPHSVLLEIQKELLDYKGVGISVLEMSHRSSDFAKIINNTENLVRELLAVPDNYKVIFLQGGGCGQFSAVPLNLIGLKAGRCADYVVTGAWSAKAAEEAKKFGTINIVHPKLGSYTKIPDPSTWNLNPDASYVYYCANETVHGVEFDFIPDVKRAVLVCDMSSNFLSKPVDVSKFGVIFAGAQKNVGSAGVTVVIVRDDLLGFALRECPSVLEYKVQAGNSSLYNTPPCFSIYVMGLVLEWIKNNGGAAAMEKLSSIKSQTIYEIIDNSQGFYVCPVEPQNRSKMNIPFRIGNAKGDDALEKRFLDKALELNMLSLKGHRSVGGIRASLYNAVTIEDVQKLAAFMKKFLEMHQL

SEQ ID NO: 1258 - protein, 370 aa, synthetic construct
MDAPRQVVNFGPGPAKLPHSVLLEIQKELLDYKGVGISVLEMSHRSSDFAKIINNTENLVRELLAVPDNYKVIFLQGGGCGQFSAVPLNLIGLKAGRCADYVVTGAWSAKAAEEAKKFGTINIVHPKLGSYTKIPDPSTWNLNPDASYVYYCANETVHGVEFDFIPDVKGAVLVCDMSSNFLSKPVDVSKFGVIFAGAQKNVGSAGVTVVIVRDDLLGFALRECPSVLEYKVQAGNSSLYNTPPCFSIYVMGLVLEWIKNNGGAAAMEKLSSIKSQTIYEIIDNSQGFYVCPVEPQNRSKMNIPFRIGNANGDDALEKRFLDKALELNMLSLKGHRSVGGIRASLYNAVTIEDVQKLAAFMKKFLEMHQL

SEQ ID NO: 1259 - protein, 370 aa, synthetic construct
MDAPRQVVNFGPGPAKLPHSVLLEIQKELLDYKGVGISVLEMSHRSSDFAKIINNTENLVRELLAVPDNYKVIFLQGGGCGQFSAVPLNLIGLKAGRCADYVVTGAWSAKAAEEAKKFGTINIVHPKLGSYTKIPDPSTWNLNPDASYVYYCANETVHGVEFDFIPDVKGAVLVCDMSSNFLSKPVDVSKFGVIFAGAQKNVGSAGVTVVIVRDDLLGFSLRECPSVLEYKVQAGNSSLYNTPPCFSIYVMGLVLEWIKNNGGAAAMEKLSSIKSQTIYEIIDNSQGFYVCPVEPQNRSKMNIPFRIGNAKGDDALEKRFLDKALELNMLSLKGHRSVGGIRASLYNAVTIEDVQKLAAFMKKFLEMHQL

SEQ ID NO: 1260 - protein, 370 aa, synthetic construct
MDAARQVVNFGPGPAKLPHSVLLEIQKELLDYKGVGISVLEMSHRSSDFAKIINNTENLVRELLAVPDNYKVIFLQGGGCGQFSAVPLNLIGLKAGRCADYVVTGAWSAKAAEEAKKFGTINIVHPKLGSYTKIPDPSTWNLNPDASYVYYCANETVHGVEFDFIPDVKGAVLVCDMSSNFLSKPVDVSKFGVIFAGAQKNVGSAGVTVVIVRDDLLGFALRECPSVLEYKVQAGNSSLYNTPPCFSIYVMGLVLEWIKNNGGAAAMEKLSSIKSQTIYEIIDNSQGFYVCPVEPQNRSKMNIPFRIGNAKGDDALEKRFLDKALELNMLSLKGHRSVGGIRASLYNAVTIEDVQKLAAFMKKFLEMHQL

SEQ ID NO: 1261 - protein, 370 aa, synthetic construct
MDAPRQVVNFGPGPAKLPHSVLLEIQKELLDYKGVGISVLEMSHRSSDFAKIINNTENLVRELLAVPDNYKVIFLQGGGCGQFSAVPLNLIGLKAGRCADYVVTGAWSAKAAEEAKKFGTINIVHPKLGSYTKIPDPSTWNLNPDASYVYYCANETVHGVEFDFIPDVKGAVLVCDMSSNFLSKPVDVSKFGVIFAGAQKNVGSAGVTVVIVRDDLLGFALRECPSVLEYKVQAGNSSLYNTPPCFSIYVMGLVLEWIKNNGGAAAMEKLSSIKSQTLYEIIDNSQGFYVCPVEPQNRSKMNIPFRIGNAKGDDALEKRFLDKALELNMLSLKGHRSVGGIRASLYNAVTIEDVQKLAAFMKKFLEMHQL

SEQ ID NO: 1262 - protein, 370 aa, synthetic construct
MDAPRQVVNFGPGPAKLPHSVLLEIQKELLDYKGVGISVLEMSHRSSDFAKIINNTENLVRELLAVPDNYKVIFLQGGGCGQFSAVPLNLIGLKAGRCADYVVTGAWSAKAVEEAKKFGTINIVHPKLGSYTKIPDPSTWNLNPDASYVYYCANETVHGVEFDFIPDVKGAVLVCDMSSNFLSKPVDVSKFGVIFAGAQKNVGSAGVTVVIVRDDLLGFALRECPSVLEYKVQAGNSSLYNTPPCFSIYVMGLVLEWIKNNGGAAAMEKLSSIKSQTIYEIIDNSQGFYVCPVEPQNRSKMNIPFRIGNAKGDDALEKRFLDKALELNMLSLKGHRSVGGIRASLYNAVTIEDVQKLAAFMKKFLEMHQL

SEQ ID NO: 1263 - protein, 370 aa, synthetic construct
MDAPRQVVNFGPGPAKLPHSVLLEIQKELLDYKGVGISVLEMSHRSSDFAKIINNTENLVRELLAVPDNYKVIFLQGGGCGQFSAVPLNLIGLKAGRCADYVVTGAWSAKAAEEAKKFGTINIVHPKLGSYTKIPDPSTWNLNPDASYVYYCANETVHGVEFDFIPDVKGAVLVCDMSSNFLSKPVDVSKFGVIFAGAQKNVGSAGVTVVIVRDDLLGFALRECPSVLEYKVQAGNSSLYNTPPCFSIYVMGLVLEWIKNNGGAAAMEKLSSNKSQTIYEIIDNSQGFYVCPVEPQNRSKMNIPFRIGNAKGDDALEKRFLDKALELNMLSLKGHRSVGGIRASLYNAVTIEDVQKLAAFMKKFLEMHQL

SEQ ID NO: 1264 - protein, 370 aa, synthetic construct
MDAPRQVVNFGPGPAKLPHSVLLEIQKELLDYKGVGISVLEMSHRSSDFAKIINNTENLVRELLAVPDNYKVIFLQGGGCGQFSAVPLNLIGLKAGRCADYVVTGAWSAKAAEEAKKFGTINIVHPKLGSYPKIPDPSTWNLNPDASYVYYCANETVHGVEFDFIPDVKGAVLVCDMSSNFLSKPVDVSKFGVIFAGAQKNVGSAGVTVVIVRDDLLGFALRECPSVLEYKVQAGNSSLYNTPPCFSIYVMGLVLEWIKNNGGAAAMEKLSSIKSQTIYEIIDNSQGFYVCPVEPQNRSKMNIPFRIGNAKGDDALEKRFLDKALELNMLSLKGHRSVGGIRASLYNAVTIEDVQKLAAFMKKFLEMHQL

SEQ ID NO: 1265 - protein, 370 aa, synthetic construct
MDAPRQVVNFGPGPAKLPHSVLLEIQKELLDYKGVGISVLEMSHRSSDFAKIINNTENLVRELLAVPDNYKVIFLQGGGCGQFSAVPLNLIGLKAGRCADYVVTGAWSAKAAEEAKKFGTINIVHPKLGSYTKIPDPSTWNLNPDASYVYYCANETVHGVEFDFIPDVKGAVLVCDMSSNFLSKPVDVSKFGVIFAGAQKNVGSAGVTVVIVRDDLLGFAFRECPSVLEYKVQAGNSSLYNTPPCFSIYVMGLVLEWIKNNGGAAAMEKLSSIKSQTIYEIIDNSQGFYVCPVEPQNRSKMNIPFRIGNAKGDDALEKRFLDKALELNMLSLKGHRSVGGIRASLYNAVTIEDVQKLAAFMKKFLEMHQL

SEQ ID NO: 1266 - protein, 370 aa, synthetic construct
MDAPRQVVNFGPGPAKLPHSVLLEIQKELLDYKGVGISVLEMSHRSSDFAKIINNTENLVRELLAVPDNYKVIFLQGGGCGQFSAVPLNLIGLKAGRCADYVVTGAWSAKAAEEAKKFGTINIVHPKLGSYTKIPDPSTWNLNPDASYVYYCANETVHGVEFDFIPDVKGAVLVCDMSSNFLSKPVDVSKFGVIFAGAQKNVGSAGVTVVIVRDDLLGFALRECPSVLEYKVQAGNTSLYNTPPCFSIYVMGLVLEWIKNNGGAAAMEKLSSIKSQTIYEIIDNSQGFYVCPVEPQNRSKMNIPFRIGNAKGDDALEKRFLDKALELNMLSLKGHRSVGGIRASLYNAVTIEDVQKLAAFMKKFLEMHQL

SEQ ID NO: 1267 - protein, 370 aa, synthetic construct
MDAPRQVVNFGPGPAKLPHSVLLEIQKELLDYKGVGISVLEMSHRSSDFAKIINNTENLVRELLAVPDNYKVIFLQGGGCGQFSAVPLNLIGLKAGRCADYVVTGAWSAKAAEEAKKFGTINIVHPKLGSYTKIPDPSTWNLNPDASYVYYCANETVHGVEFDFIPDVKGAVLVCDMSSNFLSKPVDVSKFGVIFAGAQKNVGSAGVTVVIVRHDLLGFALRECPSVLEYKVQAGNSSLYNTPPCFSIYVMGLVLEWIKNNGGAAAMEKLSSIKSQTIYEIIDNSQGFYVCPVEPQNRSKMNIPFRIGNAKGDDALEKRFLDKALELNMLSLKGHRSVGGIRASLYNAVTIEDVQKLAAFMKKFLEMHQL

SEQ ID NO: 1268 - protein, 370 aa, synthetic construct
MDAPRQVVNFGPGPAKLPHSVLLEIQKELLDYKGVGISVLEMSHRSSDFAKIINNTENLVRELLAVPDNYKVIFLQGGGCGQFSAVPLNLIGLKAGRCADYVVTGAWSAKAAEEAKKFGTINIVHPKLGSYTKIPDPSTWNPNPDASYVYYCANETVHGVEFDFIPDVKGAVLVCDMSSNFLSKPVDVSKFGVIFAGAQKNVGSAGVTVVIVRDDLLGFALRECPSVLEYKVQAGNSSLYNTPPCFSIYVMGLVLEWIKNNGGAAAMEKLSSIKSQTIYEIIDNSQGFYVCPVEPQNRSKMNIPFRIGNAKGDDALEKRFLDKALELNMLSLKGHRSVGGIRASLYNAVTIEDVQKLAAFMKKFLEMHQL

SEQ ID NO: 1269 - protein, 370 aa, synthetic construct
MDAPRQVVNFGPGPAKLPHSVLLEIQKELLDYKGVGISVLEMSHRSSDFAKIINNTENLVRELLAVPDNYKVIFLQGGGCGQFSAVPLNLIGLKAGRCADYVVTGAWSAKAAEEAKKFGTINIVHPKLGSYTKIPDPSTWNLNPDASYVYYCANETVHGVEFDFIPDVKGAVLVCDMSSNFLSKPVDVSKFGVIFAGAQKNVGSAGVTVVIVRDDLLVFALRECPSVLEYKVQAGNSSLYNTPPCFSIYVMGLVLEWIKNNGGAAAMEKLSSIKSQTIYEIIDNSQGFYVCPVEPQNRSKMNIPFRIGNAKGDDALEKRFLDKALELNMLSLKGHRSVGGIRASLYNAVTIEDVQKLAAFMKKFLEMHQL

SEQ ID NO: 1270 - protein, 370 aa, synthetic construct
MDAPRQVVNFGPGPAKLPHSVLLEIQKELLDYKGVDISVLEMSHRSSDFAKIINNTENLVRELLAVPDNYKVIFLQGGGCGQFSAVPLNLIGLKAGRCADYVVTGAWSAKAAEEAKKFGTINIVHPKLGSYTKIPDPSTWNLNPDASYVYYCANETVHGVEFDFIPDVKGAVLVCDMSSNFLSKPVDVSKFGVIFAGAQKNVGSAGVTVVIVRDDLLGFALRECPSVLEYKVQAGNSSLYNTPPCFSIYVMGLVLEWIKNNGGAAAMEKLSSIKSQTIYEIIDNSQGFYVCPVEPQNRSKMNIPFRIGNAKGDDALEKRFLDKALELNMLSLKGHRSVGGIRASLYNAVTIEDVQKLAAFMKKFLEMHQL

SEQ ID NO: 1271 - protein, 370 aa, synthetic construct
MDAPRQVVNFGPGPAKLPHSVLLEIQKELLDYKGVGISVLEMSHRSSDFAKIINNTENLVRELLAVPDNYKVIFLQGGGCGQFSAVPLNLIGLKAGRCADYVVTGAWSAKAAEEAKKFGTINIVHPKLGSYTKIPDPSTWNLNPDASYVYYCANETVHGVEFDFIPDVKGAVLVCDMSSNFLSKPVDVSKFGVIFAGAQKNVGSAGVTVVIVRDDLLGFALRECPSVLEYKVQAGNSSLYNTPPCFSIYVMGLVLEWIKNNGGAAAMEKLSSIKSQTIYEIIDNSQGFYVCPVEPQNRSKMNIPFRIGNAKGDDALEKRFLDKALELNMLSLKGHRSVGGFRASLYNAVTIEDVQKLAAFMKKFLEMHQL

SEQ ID NO: 1272 - protein, 370 aa, synthetic construct
MDAPRQVVNFGPGPAKLPHSVLLEIQKELLDYKGVGISVLEMSHRSSDFAKIINNTENLVRELLAVPDNYKVIFLQGGGCGQFSAVPLNLIGLKAGRCADYVVTGAWSAKAAEEAKKFGTINIVHPKLGSYTKIPDPSTWNLNPDASYVYYCANETVHGVEFDFIPDVKGAVLVCDMSSNFLSKPVDVSKFGVIFAGAQKNVGSAGVTVVIVRDDLLGFALRECPSVLEYKVQAGNSSLYNTPPCFSIYVMGLVLEWIKNNGGAAAMDKLSSIKSQTIYEIIDNSQGFYVCPVEPQNRSKMNIPFRIGNAKGDDALEKRFLDKALELNMLSLKGHRSVGGIRASLYNAVTIEDVQKLAAFMKKFLEMHQL

SEQ ID NO: 1273 - protein, 370 aa, synthetic construct
MDAPRQVVNFGPGPAKLPHSVLLEIQKELLDYKGVGISVLEMSHRSSDFAKIINNTENLVRELLAVPDNYKVIFLQGGGCGQFSAVPLNLIGLKAGRCADYVVTGAWSAKAAEEAKKFGTINIVHPKLGSYTKIPDPSTWNFNPDASYVYYCANETVHGVEFDFIPDVKGAVLVCDMSSNFLSKPVDVSKFGVIFAGAQKNVGSAGVTVVIVRDDLLGFALRECPSVLEYKVQAGNSSLYNTPPCFSIYVMGLVLEWIKNNGGAAAMEKLSSIKSQTIYEIIDNSQGFYVCPVEPQNRSKMNIPFRIGNAKGDDALEKRFLDKALELNMLSLKGHRSVGGIRASLYNAVTIEDVQKLAAFMKKFLEMHQL

SEQ ID NO: 1274 - protein, 370 aa, synthetic construct
MDAPRQVVNFGPGPAKLPHSVLLEIQKELLDYKGVGISVLEMSHRSSDFAKIINNTENLVRELLAVPDNYKVIFLQGGGCGQFSAVPLNLIGLKAGRCADYVVTGAWSAKAAEEAKKFGTINIVHPKLGSYTKIPDPSTWNLNPDASYVYYCANETVHGVEFDFIPDVKGAVLVCDMSSNFLSKPVDVSKFGVIFAGAQKNVGSAGVTVVIVRDDLLGFALRECPSVLEYKVQAGNSSLYNTPPCFSIYVMGLVLEWIKNNGGAAAMEKLSSIKSQTIYEIIDNSQGFYVCPVEPQNRSKMNIPFRIRNAKGDDALEKRFLDKALELNMLSLKGHRSVGGIRASLYNAVTIEDVQKLAAFMKKFLEMHQL

SEQ ID NO: 1275 - protein, 370 aa, synthetic construct
MDAPRQVVNFGPGPAKLPHSVLLEIQKELLDYKGVGISVLEMSHRSSDFAKIINNTENLVRELLAVPDNYKVIFLQGGGCGQFSAVPLNLIGLKAGRCADYVVTGAWSAKAAEEAKKFGTINIVHPKLGSYTKIPDPSTWNLNPDASYVYYCANETVHGVEFDFIPDVKGAVLVCDMSSNFLSKPVDVSKFGVIFAGAQKNVGSAGVTVVIVRDDLLGFALRECPSVLEYKVQAGNSSLYNTPPCFSIYVMGLVLEWIKNNGGAAAMEKLSSIKSQTIYEIIDNSQGFYVCPVEPQNRSKMNIPFRIGNAKGDDSLEKRFLDKALELNMLSLKGHRSVGGIRASLYNAVTIEDVQKLAAFMKKFLEMHQL

SEQ ID NO: 1276 - protein, 370 aa, synthetic construct
MDAPRQVVNFGPGPAKLPHSVLLEIQKELLNYKGVGISVLEMSHRSSDFAKIINNTENLVRELLAVPDNYKVIFLQGGGCGQFSAVPLNLIGLKAGRCADYVVTGAWSAKAAEEAKKFGTINIVHPKLGSYTKIPDPSTWNLNPDASYVYYCANETVHGVEFDFIPDVKGAVLVCDMSSNFLSKPVDVSKFGVIFAGAQKNVGSAGVTVVIVRDDLLGFALRECPSVLEYKVQAGNSSLYNTPPCFSIYVMGLVLEWIKNNGGAAAMEKLSSIKSQTIYEIIDNSQGFYVCPVEPQNRSKMNIPFRIGNAKGDDALEKRFLDKALELNMLSLKGHRSVGGIRASLYNAVTIEDVQKLAAFMKKFLEMHQL

SEQ ID NO: 1277 - protein, 370 aa, synthetic construct
MDAPRQVVNFGPGPAKLPHSVLLEIQKELLDYKGVGISVLEMSHRSSDFAKIINNTENLVRELLAVPDNYKVIFLQGGGCGQFSAVPLNLIGLKAGRCADYVVTGAWSAKAAEEAKKFGTINIVHPKLGSYTKIPDPSTWNLNPDASYVYYCANETVHGVEFDFIPDVKGAVLVCDMSSNFLSKPVDVSKFGVIFAGAQKNVGSAGVTVVIVRDDLLGFALRECPSVLEYKVQAGNSSLYNTPPCFSIYVMGLVLEWIKNNGGPAAMEKLSSIKSQTIYEIIDNSQGFYVCPVEPQNRSKMNIPFRIGNAKGDDALEKRFLDKALELNMLSLKGHRSVGGIRASLYNAVTIEDVQKLAAFMKKFLEMHQL

SEQ ID NO: 1278 - protein, 370 aa, synthetic construct
MDAPRQVVNFGPGPAKLPHSVLLEIQKELLDYKGVGISVLEMSHRSSDFAKIINNTENLVRELLAVPDNYKVIFLQGGGCGQFSAVPLNLIGLKAGRCADYVVTGAWSAKAAEEAKKFGTINIVHPKLGSYTKIPDPSTWNLNPDASYVYYCANETVHGVEFDFIPDVKGAVLVCDMSSNFLSKPVDVSKFGVIFAGAQKNVGSAGVTVVIVRDDLLGFALRECPSVLEYKVQAGNSSLYNTPPCFSIYVMGLVLEWIKNNGGAAAMEKLSSIKSQTIYEIIDNSQGFYVCPVEPQNRSKMNIPFLIGNAKGDDALEKRFLDKALELNMLSLKGHRSVGGIRASLYNAVTIEDVQKLAAFMKKFLEMHQL

SEQ ID NO: 1279 - protein, 370 aa, synthetic construct
MDAPRQVVNFGPGPAKLPHSVLLEIQKELLDYKGVGISVLEMSHRSADFAKIINNTENLVRELLAVPDNYKVIFLQGGGCGQFSAVPLNLIGLKAGRCADYVVTGAWSAKAAEEAKKFGTINIVHPKLGSYTKIPDPSTWNLNPDASYVYYCANETVHGVEFDFIPDVKGAVLVCDMSSNFLSKPVDVSKFGVIFAGAQKNVGSAGVTVVIVRDDLLGFALRECPSVLEYKVQAGNSSLYNTPPCFSIYVMGLVLEWIKNNGGAAAMEKLSSIKSQTIYEIIDNSQGFYVCPVEPQNRSKMNIPFRIGNAKGDDALEKRFLDKALELNMLSLKGHRSVGGIRASLYNAVTIEDVQKLAAFMKKFLEMHQL

SEQ ID NO: 1280 - protein, 370 aa, synthetic construct
MDAPRQVVNFGPGPAKLPHSVLLEIQKELLDYKVVGISVLEMSHRSSDFAKIINNTENLVRELLAVPDNYKVIFLQGGGCGQFSAVPLNLIGLKAGRCADYVVTGAWSAKAAEEAKKFGTINIVHPKLGSYTKIPDPSTWNLNPDASYVYYCANETVHGVEFDFIPDVKGAVLVCDMSSNFLSKPVDVSKFGVIFAGAQKNVGSAGVTVVIVRDDLLGFALRECPSVLEYKVQAGNSSLYNTPPCFSIYVMGLVLEWIKNNGGAAAMEKLSSIKSQTIYEIIDNSQGFYVCPVEPQNRSKMNIPFRIGNAKGDDALEKRFLDKALELNMLSLKGHRSVGGIRASLYNAVTIEDVQKLAAFMKKFLEMHQL

SEQ ID NO: 1281 - protein, 370 aa, synthetic construct
MDAPRQVVNFGPGPAKLPHSVLLEIQKELLDYKGVGISVLEMSHRSSDFAKIINNTENLVRELLAVPDNYKVIFLQGGGCGQFSAVPLNLIGLKAGRCADYVVTGAWSAKAAEEAKKFGTINIVHPKLGSYTKIPDPSTWNLNPDASYVYYCANETVHGVEFDFIPDVKGAVLVCDMSSNFLSKPVDVSKFGVIFAGAQKNVGSAGVTVVVVRDDLLGFALRECPSVLEYKVQAGNSSLYNTPPCFSIYVMGLVLEWIKNNGGAAAMEKLSSIKSQTIYEIIDNSQGFYVCPVEPQNRSKMNIPFRIGNAKGDDALEKRFLDKALELNMLSLKGHRSVGGIRASLYNAVTIEDVQKLAAFMKKFLEMHQL

SEQ ID NO: 1282 - protein, 370 aa, synthetic construct
MDAPRQVVNFGPGPAKLPHSVLLEIQKELLDYKGVGISVLEMSHRSSDFAKIINNTENLVRELLAVPDNYKVIFLQGGGCGQFSAVPLNLIGLKAGRCADYVVTGAWSAKAAEEAKKFGTINIVHPKLGSYTKIPDPSTWNLNPDASYVYYCANETVHGVEFDFIPDVKGAVLVCDMSSNFLSKPVDVSKFGVIFAGAQKNVGSAGVTVVIVRDDLLGFALRECPSVLEYKVQAGNSSLYNTPPCFSIYVMGLVLEWNKNNGGAAAMEKLSSIKSQTIYEIIDNSQGFYVCPVEPQNRSKMNIPFRIGNAKGDDALEKRFLDKALELNMLSLKGHRSVGGIRASLYNAVTIEDVQKLAAFMKKFLEMHQL

SEQ ID NO: 1283 - protein, 370 aa, synthetic construct
MDAPRQVVNFGPGPAKLPHSVLLEIQKELLDYKGVGISVLEMSHRSSDFAKIINNTENLVRELLAVPDNYKVIFLQGGGCGQFSAVPLNLIGLKAGRCADYVVTGAWSAKAAEEAKKFGTINIVHPKLGSYTKIPDPSTWNLNPDASYVYYCANETVHGVEFDFIPDVKGAVLVCDMSSNFLSKPVDVSKFGVIFAGAQKNVGSAGVTVVIVRDDLLGFALRQCPSVLEYKVQAGNSSLYNTPPCFSIYVMGLVLEWIKNNGGAAAMEKLSSIKSQTIYEIIDNSQGFYVCPVEPQNRSKMNIPFRIGNAKGDDALEKRFLDKALELNMLSLKGHRSVGGIRASLYNAVTIEDVQKLAAFMKKFLEMHQL

SEQ ID NO: 1284 - protein, 370 aa, synthetic construct
MDAPRQVVNFGPGPAKLPHSVLLEIQKELLDYKGVGISVLEMSHRSSDFAKIINNTENLVRELLAVPDNYKVIFLQGGGCGQFSAVPLNLIGLKAGRCADYVVTGAWSAKAAEEAKKFGTINIVHPKLGSYTKIPDPSTWNLNPDASYVYYCANETVHGVEFDFIPDVKGAVLVCDMSSNFLSKPVDVSKFGVIFAGAQKNVGSAGVTVVIVRDDLLGFALRECPSVLEYKVQAGNSSLYNTPPCFSIYVMGLVLEWIKNNGGAAAMEKLSSIKSQTIYEIIDHSQGFYVCPVEPQNRSKMNIPFRIGNAKGDDALEKRFLDKALELNMLSLKGHRSVGGIRASLYNAVTIEDVQKLAAFMKKFLEMHQL

SEQ ID NO: 1285 - protein, 370 aa, synthetic construct
MDAPRQVVNFGPGPAKLPHSVLLEIQKELLDYKGVGISVLEMSHRSSDFSKIINNTENLVRELLAVPDNYKVIFLQGGGCGQFSAVPLNLIGLKAGRCADYVVTGAWSAKAAEEAKKFGTINIVHPKLGSYTKIPDPSTWNLNPDASYVYYCANETVHGVEFDFIPDVKGAVLVCDMSSNFLSKPVDVSKFGVIFAGAQKNVGSAGVTVVIVRDDLLGFALRECPSVLEYKVQAGNSSLYNTPPCFSIYVMGLVLEWIKNNGGAAAMEKLSSIKSQTIYEIIDNSQGFYVCPVEPQNRSKMNIPFRIGNAKGDDALEKRFLDKALELNMLSLKGHRSVGGIRASLYNAVTIEDVQKLAAFMKKFLEMHQL

SEQ ID NO: 1286 - protein, 370 aa, synthetic construct
MDAPRQVVNFGPGPAKLPHSVLLEIQKELLDYKGVGISVLEMSHRSSDFAKIINNTENLVRELLAVPDNYKVIFLQGGGCGQFSAVPLNLIGLKAGRCADYVVTGAWSAKAAEEAKKFGTINIVHPKLGSYTKIPDPSTWNLNPDASYVYYCANETVHGVEFDFIPDVKGAVLVCDMSSNFLSKPVDVSKFGVIFAGAQKNVGSAGVTVVIVRDDLLGFALRECPSVLEYKVQAGNSSLYNTPPCFSIYVMGLVLEWIKNNGGAAAMEKLSSIKSQTIYEIIDNSQGFYVCPVESQNRSKMNIPFRIGNAKGDDALEKRFLDKALELNMLSLKGHRSVGGIRASLYNAVTIEDVQKLAAFMKKFLEMHQL

SEQ ID NO: 1287 - protein, 370 aa, synthetic construct
MDAPREVVNFGPGPAKLPHSVLLEIQKELLDYKGVGISVLEMSHRSSDFAKIINNTENLVRELLAVPDNYKVIFLQGGGCGQFSAVPLNLIGLKAGRCADYVVTGAWSAKAAEEAKKFGTINIVHPKLGSYTKIPDPSTWNLNPDASYVYYCANETVHGVEFDFIPDVKGAVLVCDMSSNFLSKPVDVSKFGVIFAGAQKNVGSAGVTVVIVRDDLLGFALRECPSVLEYKVQAGNSSLYNTPPCFSIYVMGLVLEWIKNNGGAAAMEKLSSIKSQTIYEIIDNSQGFYVCPVEPQNRSKMNIPFRIGNAKGDDALEKRFLDKALELNMLSLKGHRSVGGIRASLYNAVTIEDVQKLAAFMKKFLEMHQL

SEQ ID NO: 1288 - protein, 370 aa, synthetic construct
MDAPRQVVNFGPGPAKLPHSVLLEIQKELLDYKGVGISVLEMSHRSSDFAKIINNTENLVRELLAVPDNYKVIFLQGGGCGQFSAVPLNLIGLKAGRCADYVVTGAWSAKAAEEAKKFGTINIVHPKLGSYTKIPDPSTWNLNPDASYVYYCANETVHGVEFDFIPDVKGAVLVCDMSSNFLSKPVDVSKFGVIFAGAQKNVGSAGVTVVIVRDDLLGFALRECPSVLEYKVQAGNSSLYNTPPCFSIYVMGLVLEWIKNNGGAAAMEKLSSIKSQTIYEIIDNSQGFYVCPVEPQNRSKMNIPFRIGNAKGDDALEKRFLDKALELNMLSLKGHRSVGGIRASLYNAVTIEDVQKLGAFMKKFLEMHQL

SEQ ID NO: 1289 - protein, 370 aa, synthetic construct
MDAPRQVVNFGPGPAKLPHSVLLEIQKELLDYKGVGISVLEMSHRSSDFAKIINNTENLVRELLAVPDNYKVIFLQGGGCGQFSAVPLNLIGLKAGRCADYVVTGAWSAKAAEEAKKFGTINIVHPKLGSYTKIPDPSTWNLNPDASYVYYCANETVHGVEFDFIPDVKGAVLVCDMSSNFLSKPVDVSKFGVIFAGAQKNVGSAGVTVVIVRDDLLGFALRECPSVLEYKVQAGNSSLYNTPPCFSIYVMGLVLEWIKNNGGAAAMEKLSSIKSQTIYEIIDNSQGFYVCPVEPQNRSKMNIPFRIGNAKGDDALEKRFHDKALELNMLSLKGHRSVGGIRASLYNAVTIEDVQKLAAFMKKFLEMHQL

SEQ ID NO: 1290 - protein, 370 aa, synthetic construct
MDAPRQVVNFGPGPAKLPHSVLLEIQKELLDYKGVGISVLEMSHRSSDFAKIINNTENLVRELLAVPDNYKVIFLQGGGCGQFSAVPLNLIGLKAGRCADYVVTGAWSAKAAEEAKKFGTINIVHPKLGSYTKIPDPSTWNLNPDASYVYYCANETVHGVEFDFIPDVKGAVLVCDMSSNFLSKPVDVSKFGVIFAGAQKNVGSAGVTVVIVRADLLGFALRECPSVLEYKVQAGNSSLYNTPPCFSIYVMGLVLEWIKNNGGAAAMEKLSSIKSQTIYEIIDNSQGFYVCPVEPQNRSKMNIPFRIGNAKGDDALEKRFLDKALELNMLSLKGHRSVGGIRASLYNAVTIEDVQKLAAFMKKFLEMHQL

SEQ ID NO: 1291 - protein, 370 aa, synthetic construct
MDAPRQVVNFGPGPAKLPHSVLLEIQKELLDYKGVGISVLEMSHRSSDFAKIINNTENLVRELLAVPDNYKVIFLQGGGCGQFSAVPLNLIGLKAGRCADYVVTGAWSAKAAEEAKKFGTINIVHPKLGSYTKIPDPSTWNLNPDASYVYYCANETVHGVEFDFIPDVKGAVLVCDMSSNFLSKPVDVSKFGVIFAGAQKNVGSSGVTVVIVRDDLLGFALRECPSVLEYKVQAGNSSLYNTPPCFSIYVMGLVLEWIKNNGGAAAMEKLSSIKSQTIYEIIDNSQGFYVCPVEPQNRSKMNIPFRIGNAKGDDALEKRFLDKALELNMLSLKGHRSVGGIRASLYNAVTIEDVQKLAAFMKKFLEMHQL

SEQ ID NO: 1292 - protein, 370 aa, synthetic construct
MDAPRQVVNFGPGPAKLPHSVLLEIQKELLDYKGVGISVLEMSHRSSDFAKIINNTENLVRELLAVPDNYKVIFLQGGGCGQFSAVPLNLIGLKAGRCADYVVTGAWSAKAAEEAKKFGTINIVHPKLGSYTKIPDPSTWNLNPDASYVYYCANETVHGVEFDFIPDVKGAVLVCDMSSNFLSKPVDISKFGVIFAGAQKNVGSAGVTVVIVRDDLLGFALRECPSVLEYKVQAGNSSLYNTPPCFSIYVMGLVLEWIKNNGGAAAMEKLSSIKSQTIYEIIDNSQGFYVCPVEPQNRSKMNIPFRIGNAKGDDALEKRFLDKALELNMLSLKGHRSVGGIRASLYNAVTIEDVQKLAAFMKKFLEMHQL

SEQ ID NO: 1293 - protein, 370 aa, synthetic construct
MDAPRQVVNFGPGPAKLPHSVLLEIQKELLDYKGVGISVLEMSHRSSDFAKIINNTENLVRELLAVPDNYKVIFLQGGGCGQFSAVPLNLIGLKAGRCADYVVTGAWSAKAAEEAKKFGTINIVHPKLGSYTKIPDPSTWNLNPDASYVYYCANETVHGVEFDFIPDVKGAVLVCDMSSNFLSKPVDVSKFGVIFAGAQKNVGSAGVTVVIVRDDLLGFALRECPSVLEYKVQAGNSSLFNTPPCFSIYVMGLVLEWIKNNGGAAAMEKLSSIKSQTIYEIIDNSQGFYVCPVEPQNRSKMNIPFRIGNAKGDDALEKRFLDKALELNMLSLKGHRSVGGIRASLYNAVTIEDVQKLAAFMKKFLEMHQL

SEQ ID NO: 1294 - protein, 370 aa, synthetic construct
MDAPRQVVNFGPGPAKLPHSVLLEIQKELLDYKGVGISVLEMSHRSSDFAKIINNTENLVRELLAVPDNYKVIFLQGGGCGQFSAVPLNLIGLKAGRCADYVVTGAWSAKAAEEAKKFGTINIVHPKLGSYTKIPDPSTWNLNPDASYVYYCANETVHGVEFDFIPDVKGAVLVCDMSSNFLSKPVDVSKFGVIFAGAQKNVGSAGVTVVIVRDDLLGFALRECPSVLEYKVQAGNSSLYNTPPCFSIYVMGLVLEWIKNNGGAAAMEKLSSMKSQTIYEIIDNSQGFYVCPVEPQNRSKMNIPFRIGNAKGDDALEKRFLDKALELNMLSLKGHRSVGGIRASLYNAVTIEDVQKLAAFMKKFLEMHQL

SEQ ID NO: 1295 - protein, 370 aa, synthetic construct
MDAPRQVVNFGPGPAKLPHSVLLEIQKELLDYKGVGISVLEMSHRSSDFAKIINNTENLVRELLAVPDNYKVIFLQGGGCGQFSAVPLNLIGLKAGRCADYVVTGAWSAKAAEEAKKLGTINIVHPKLGSYTKIPDPSTWNLNPDASYVYYCANETVHGVEFDFIPDVKGAVLVCDMSSNFLSKPVDVSKFGVIFAGAQKNVGSAGVTVVIVRDDLLGFALRECPSVLEYKVQAGNSSLYNTPPCFSIYVMGLVLEWIKNNGGAAAMEKLSSIKSQTIYEIIDNSQGFYVCPVEPQNRSKMNIPFRIGNAKGDDALEKRFLDKALELNMLSLKGHRSVGGIRASLYNAVTIEDVQKLAAFMKKFLEMHQL

SEQ ID NO: 1296 - protein, 370 aa, synthetic construct
MDAPRQVVNFGPGPAKLPHSVLLEIQKELLDYKGVGISVLEMSHRSSDFAKIINNTENLVRELLAVPDNYKVIFLQGGGCGQFSAVPLNLIGLKAGRCADYVVTGAWSAKAAEEAKKFGTINIVHPKLGSYTKIPDPSTWNLNPDASYVYYCANETVHGVEFDFIPDVKGAVLVCDMSSNFLSKPVDVSKFGVIFAGAQKNVGSAGVTVVIVRDDLLGFALRECPSVLEYKVQAGNSSLYNTPPCFSIYVMGLVLEWIKNNGGAAAMEKLSSIKSQTIYEIIDNSQGFYVCPVEPQNRSKMNIPFRIGNAKGEDALEKRFLDKALELNMLSLKGHRSVGGIRASLYNAVTIEDVQKLAAFMKKFLEMHQL

SEQ ID NO: 1297 - protein, 370 aa, synthetic construct
MDAPRQVVNFGPGPAKLPHSVLLEIQKELLDYKGVGISVLEMSHRSSDFAKIINNTENLVRELLAVPDNYKVIFLQGGGCGQFSAVPLNLIGLKAGRCADYVVTGAWSAKAAEEAKKFGTINIVHPKLGSYTKIPDPSTWNLNPDASYVYYCANETVHGVEFDFIPDVKGAVLVCDMSSNFLSKPVDVSKFGVIFAGAQKNVGSAGVTVVIVRDDLLGFALRECPSVLEYKVQAGNSSLYNTPPCFSIYVMGLVLEWIKNNGGAAAMEKLSSIKSQTIYEIIDNSQGFYVCPVEPQNRSKMNIPFRIGNAKGDGALEKRFLDKALELNMLSLKGHRSVGGIRASLYNAVTIEDVQKLAAFMKKFLEMHQL

SEQ ID NO: 1298 - protein, 370 aa, synthetic construct
MDAPRQVVNFGPGPAKLPHSVLLEIQKELLDYKGVAISVLEMSHRSSDFAKIINNTENLVRELLAVPDNYKVIFLQGGGCGQFSAVPLNLIGLKAGRCADYVVTGAWSAKAAEEAKKFGTINIVHPKLGSYTKIPDPSTWNLNPDASYVYYCANETVHGVEFDFIPDVKGAVLVCDMSSNFLSKPVDVSKFGVIFAGAQKNVGSAGVTVVIVRDDLLGFALRECPSVLEYKVQAGNSSLYNTPPCFSIYVMGLVLEWIKNNGGAAAMEKLSSIKSQTIYEIIDNSQGFYVCPVEPQNRSKMNIPFRIGNAKGDDALEKRFLDKALELNMLSLKGHRSVGGIRASLYNAVTIEDVQKLAAFMKKFLEMHQL

SEQ ID NO: 1299 - protein, 370 aa, synthetic construct
MDAPRQVVNFGPGPAKLPHSVLLEIQKELLDYKGVGISVLEMSHRSSDFAKIINNTENLVRELLAVPDNYKVIFLQGGGCGQFSAVPLNLIGLKAGRCADYVVTGAWSAKAAEEAKKFGTINIVHPKLGSYTKIPDPSTWNLNPDASYVYYCANETVHGVEFDFIPDVKGAVLVCDMSSNFLSKPVDVSKFGVIFAGAQKNVGSAGVTVVIVRDDLLGFALRECPSVLEYKVQAGNSSLYNTPPCFSIYVMGLVLEWIKNNGGAAAMEKLSSVKSQTIYEIIDNSQGFYVCPVEPQNRSKMNIPFRIGNAKGDDALEKRFLDKALELNMLSLKGHRSVGGIRASLYNAVTIEDVQKLAAFMKKFLEMHQL

SEQ ID NO: 1300 - protein, 370 aa, synthetic construct
MDAPRQVVNFGPGPAKLPHSVLLEIQKELLDYKGVGISVLEMSHRSSDFAKIINNTENLVRELLAVPDNYKVIFLQGGGCGQFSAVPLNLIGLKAGRCADYVVTGAWSAKAAEEAKKFGTITIVHPKLGSYTKIPDPSTWNLNPDASYVYYCANETVHGVEFDFIPDVKGAVLVCDMSSNFLSKPVDVSKFGVIFAGAQKNVGSAGVTVVIVRDDLLGFALRECPSVLEYKVQAGNSSLYNTPPCFSIYVMGLVLEWIKNNGGAAAMEKLSSIKSQTIYEIIDNSQGFYVCPVEPQNRSKMNIPFRIGNAKGDDALEKRFLDKALELNMLSLKGHRSVGGIRASLYNAVTIEDVQKLAAFMKKFLEMHQL

SEQ ID NO: 1301 - protein, 370 aa, synthetic construct
MDAPRQVVNFGPGPAKLPHSVLLEIQKELLDYKGVGISVLEMSHRSSDFAKIINNTENLVRELLAVPDNYKVIFLQGGGCGQFSAVPLNLIGLKAGRCADYVVTGAWSAKAAEEAKKFGTINIVHPKLGSYTKIPDPSTWNLNPDASYVYYCANETVHGVEFDFIPDVKGAVLVCDMSSNFLSKPVDVSKFGVIFAGAQKNVGSAGVTVVIVRDDLLGFALRECPSVLEYKVQAGNSSLYNTPPCFSIYVMGLVLEWIKNNGGAAAMEKLSSIKSQTIYEIIDNSQGFYVCPVEPQNRSKMNIPFRIGNAKGDDALEKIFLDKALELNMLSLKGHRSVGGIRASLYNAVTIEDVQKLAAFMKKFLEMHQL

SEQ ID NO: 1302 - protein, 370 aa, synthetic construct
MDAPRQVVNFGPGPAKLPHSVLLEIQKELLDYKGVGISVLEMSHRSSDFAKIINNTENLVRELLSVPDNYKVIFLQGGGCGQFSAVPLNLIGLKAGRCADYVVTGAWSAKAAEEAKKFGTINIVHPKLGSYTKIPDPSTWNLNPDASYVYYCANETVHGVEFDFIPDVKGAVLVCDMSSNFLSKPVDVSKFGVIFAGAQKNVGSAGVTVVIVRDDLLGFALRECPSVLEYKVQAGNSSLYNTPPCFSIYVMGLVLEWIKNNGGAAAMEKLSSIKSQTIYEIIDNSQGFYVCPVEPQNRSKMNIPFRIGNAKGDDALEKRFLDKALELNMLSLKGHRSVGGIRASLYNAVTIEDVQKLAAFMKKFLEMHQL

SEQ ID NO: 1303 - protein, 370 aa, synthetic construct
MDAPRQVVNFGPGPAKLPHSVLLEIQKELLDYKGVGISVLEMSHRSSDFAKIINNTENLVRELLAVPDNYKVIFLQGGGCGQFSAVPLNLIGLKAGRCADYVVTGAWSAKAAEEAKKFGTINIVHPKLGSYTKIPDPSTWNLNPDASYVYYCANETVHGVEFDFIPDVKGAVLVCDMSSNFLSKPVDVSKFGVIFAGAQKNVGSAGVTVVIVRDDLLGFALRECPSVLEYKVQAGNSSLYNTPPCFSIYVMGLVLEWIKNNGGAAAMEKLSSIKSQTIYEIIDNSQGFYVGPVEPQNRSKMNIPFRIGNAKGDDALEKRFLDKALELNMLSLKGHRSVGGIRASLYNAVTIEDVQKLAAFMKKFLEMHQL

SEQ ID NO: 1304 - protein, 370 aa, synthetic construct
MDAPRQVVNFGPGPAKLPHSVLLEIQKELLDYKRVGISVLEMSHRSSDFAKIINNTENLVRELLAVPDNYKVIFLQGGGCGQFSAVPLNLIGLKAGRCADYVVTGAWSAKAAEEAKKFGTINIVHPKLGSYTKIPDPSTWNLNPDASYVYYCANETVHGVEFDFIPDVKGAVLVCDMSSNFLSKPVDVSKFGVIFAGAQKNVGSAGVTVVIVRDDLLGFALRECPSVLEYKVQAGNSSLYNTPPCFSIYVMGLVLEWIKNNGGAAAMEKLSSIKSQTIYEIIDNSQGFYVCPVEPQNRSKMNIPFRIGNAKGDDALEKRFLDKALELNMLSLKGHRSVGGIRASLYNAVTIEDVQKLAAFMKKFLEMHQL

SEQ ID NO: 1305 - protein, 370 aa, synthetic construct
MDAPRQVVNFGPGPAKLPHSVLLEIQKELLDYKGVGISVLEMSHRSSDFAKIINNTENLVRELLAVPDNYKVIFLQGGGCGQFSAVPLNLIGLKAGRCADYVVTGAWSAKAAEEAKKFGTINIVHPKLGSYTKIPDPSTWNLNPDASYVYYCANETVHGVEFDFIPDVKGAVLVCDMSSNFLSKPVDVSKFGVIFAGAQKNVGSAGVTVVIVRDDLLGYALRECPSVLEYKVQAGNSSLYNTPPCFSIYVMGLVLEWIKNNGGAAAMEKLSSIKSQTIYEIIDNSQGFYVCPVEPQNRSKMNIPFRIGNAKGDDALEKRFLDKALELNMLSLKGHRSVGGIRASLYNAVTIEDVQKLAAFMKKFLEMHQL

SEQ ID NO: 1306 - protein, 370 aa, synthetic construct
MDAPRQVVNFGPGPAKLPHSVLLEIQKELLDYKGVGISVLEMSHRSSDFAKIINNTENLVRELLAVPDNYKVIFLQGGGCGQFSAVPLNLIGLKAGRCADYVVTGAWSAKAAEEAKKFGTINIVHPKLGSYTKIPDPSTWNLNPDASYVYYCANETVHGVEFDFIPDVKGAVLVCDMSSNFLSKPVDVSKFGVIFAGAQKNVGSAGVTVVIVRDDLLGFALRECPSVLEYKVQAGNSSLYNTPPCFSIYVMGLVLEWIKNNGGAAAMEKLRSIKSQTIYEIIDNSQGFYVCPVEPQNRSKMNIPFRIGNAKGDDALEKRFLDKALELNMLSLKGHRSVGGIRASLYNAVTIEDVQKLAAFMKKFLEMHQL

SEQ ID NO: 1307 - protein, 370 aa, synthetic construct
MDAPRQVVNFGPGPAKLPHSVLLEIQKELLDYKGVGISVLEMSHRSSDFAKIINNTENLVRELLAVPDNYKVIFLQGGGCGQFSAVPLNLIGLKAGRCADYVVTGAWSAKAAEEAKKFGTINIVHPKLGSYTKIPDPSTWNLNPDASYVYYCANETVHGVEFDFIPDVKGAVLVCDMSSNFLSKPVDVSKFGVIFAGAQKNVGSAGVTVVIVRDDLLGFALRECPSVLEYKVQAGNSSLYNTPPCFSIYVMGLVLEWIKNNGGAAAMEKLSSIKSRTIYEIIDNSQGFYVCPVEPQNRSKMNIPFRIGNAKGDDALEKRFLDKALELNMLSLKGHRSVGGIRASLYNAVTIEDVQKLAAFMKKFLEMHQL

SEQ ID NO: 1308 - protein, 370 aa, synthetic construct
MDAPRQVVNFGPGPAKLPHSVLLEIQKELLDYKGVGISVLELSHRSSDFAKIINNTENLVRELLAVPDNYKVIFLQGGGCGQFSAVPLNLIGLKAGRCADYVVTGAWSAKAAEEAKKFGTINIVHPKLGSYTKIPDPSTWNLNPDASYVYYCANETVHGVEFDFIPDVKGAVLVCDMSSNFLSKPVDVSKFGVIFAGAQKNVGSAGVTVVIVRDDLLGFALRECPSVLEYKVQAGNSSLYNTPPCFSIYVMGLVLEWIKNNGGAAAMEKLSSIKSQTIYEIIDNSQGFYVCPVEPQNRSKMNIPFRIGNAKGDDALEKRFLDKALELNMLSLKGHRSVGGIRASLYNAVTIEDVQKLAAFMKKFLEMHQL

SEQ ID NO: 1309 - protein, 370 aa, synthetic construct
MDAPRQVVNFGPGPAKLPHSVLLEIQKELLDYKGVGISVLEMSHRSSDFAKIINNTENLVRELLAVPDNYKVIFLQGGGCGQFSAVPLNLIGLKAGRCADYVVTGAWSAKAAEEAKKFGTINIVHPKLGSYTKIPDPSTWNLNPDASYVYYCANETVHGVEFDFIPDVKGAVLVCDMSSNFLSKPVDVSKFGVIFAGAQKNVGSAGVTVVIVRDDLLGFALRECPSVLEYKVQAGNSSLYNTPPCFSIYVMGLVLEWIKNNGGAAAMEKLSSIKSQTIYEIIDNSQGFYVCPVEPQNRSKMNIPFRIGNAKGDDALEKRFLDKALELNMLSLKGHRSVRGIRASLYNAVTIEDVQKLAAFMKKFLEMHQL

SEQ ID NO: 1310 - protein, 370 aa, synthetic construct
MDAPRQVVNFGPGPAKLPHSVLLEIQKELLDYKGVGISVLEMSHRSSDFAKIINNTQNLVRELLAVPDNYKVIFLQGGGCGQFSAVPLNLIGLKAGRCADYVVTGAWSAKAAEEAKKFGTINIVHPKLGSYTKIPDPSTWNLNPDASYVYYCANETVHGVEFDFIPDVKGAVLVCDMSSNFLSKPVDVSKFGVIFAGAQKNVGSAGVTVVIVRDDLLGFALRECPSVLEYKVQAGNSSLYNTPPCFSIYVMGLVLEWIKNNGGAAAMEKLSSIKSQTIYEIIDNSQGFYVCPVEPQNRSKMNIPFRIGNAKGDDALEKRFLDKALELNMLSLKGHRSVGGIRASLYNAVTIEDVQKLAAFMKKFLEMHQL

SEQ ID NO: 1311 - protein, 370 aa, synthetic construct
MDAPRQVVNFGPGPAKLPHSVLLEIQKELLDYKGVGISVLEMSHRSSDFAKIINNTENLVRELLAVPDNYKVIFLQGGGCGQFSAVPLNLIGLKAGRCADYVVTGAWSAKAAEEAKKFGTINIVHPKLGSYTKIPDPSTWNLNPDASYVYYCANETVHGVEFDFIPDGKGAVLVCDMSSNFLSKPVDVSKFGVIFAGAQKNVGSAGVTVVIVRDDLLGFALRECPSVLEYKVQAGNSSLYNTPPCFSIYVMGLVLEWIKNNGGAAAMEKLSSIKSQTIYEIIDNSQGFYVCPVEPQNRSKMNIPFRIGNAKGDDALEKRFLDKALELNMLSLKGHRSVGGIRASLYNAVTIEDVQKLAAFMKKFLEMHQL

SEQ ID NO: 1312 - protein, 370 aa, synthetic construct
MDAPRQVVNFGPGPAKLLHSVLLEIQKELLDYKGVGISVLEMSHRSSDFAKIINNTENLVRELLAVPDNYKVIFLQGGGCGQFSAVPLNLIGLKAGRCADYVVTGAWSAKAAEEAKKFGTINIVHPKLGSYTKIPDPSTWNLNPDASYVYYCANETVHGVEFDFIPDVKGAVLVCDMSSNFLSKPVDVSKFGVIFAGAQKNVGSAGVTVVIVRDDLLGFALRECPSVLEYKVQAGNSSLYNTPPCFSIYVMGLVLEWIKNNGGAAAMEKLSSIKSQTIYEIIDNSQGFYVCPVEPQNRSKMNIPFRIGNAKGDDALEKRFLDKALELNMLSLKGHRSVGGIRASLYNAVTIEDVQKLAAFMKKFLEMHQL

SEQ ID NO: 1313 - protein, 370 aa, synthetic construct
MDAPRQVVNFGPGPAKLPHSVLLEIQKELLDYKGVGISVLEMSHRSSDFAKIINNTENLVRELLAVPDNYKVIFLQGGGCGQFSAVPLNLIGLKAGRCADYVVTGAWSAKAAEEAKKFGTINIVHPKLGSYTKIPDPSTWNLNPDASYVYYCANETVHGVEFDFIPDVNGAVLVCDMSSNFLSKPVDVSKFGVIFAGAQKNVGSAGVTVVIVRDDLLGFALRECPSVLEYKVQAGNSSLYNTPPCFSIYVMGLVLEWIKNNGGAAAMEKLSSIKSQTIYEIIDNSQGFYVCPVEPQNRSKMNIPFRIGNAKGDDALEKRFLDKALELNMLSLKGHRSVGGIRASLYNAVTIEDVQKLAAFMKKFLEMHQL

SEQ ID NO: 1314 - protein, 370 aa, synthetic construct
MDAPRQVVNFGPGPAKLPHSVLLEIQKELLDYKGVGISVLEMSHRSSDFAKIINNTENLVRELLAVPDNYKVIFLQGGGCGQFSAVPLNLIGLKAGRCADYVVTGAWSAKAAEEAKKFGTINIVHPKLGSYTKIPDPSTWNLNPDASYVYYCANETVHGVEFDFIPDVKGAVLVCDMSSNFLSKPVDVSKFGVIFAGAQKNVGSAGVTVVIVRDDLLGFALRECPSVLEYKVQAGNSSLYNTPPCFSIYVMGLVLEWIKNNGGAAAMEKLSSIKSQTIYEIIDNSQGFYVCPVEPQNRSKMNIPFRIGNAKGDDALEKRFLEKALELNMLSLKGHRSVGGIRASLYNAVTIEDVQKLAAFMKKFLEMHQL

SEQ ID NO: 1315 - protein, 370 aa, synthetic construct
MDAPRQVVNFGPGPAKLPHSVLLEIQKELLDYKGVGISVLEMSHRSSDFAKIINNTENLVRELLAVPDNYKVIFLQGGGCGQFSAVPLNLIGLKAGRCADYVVTGAWSAKAAEEAKKFGTINIVHPKLGSYTKIPDPSTWNLNPDASYVYYCANETVHGVEFDFIPDVKGAVLVCDMSSNFLSKPVDVSKFGVIFAGAQKNVGSAGVTVVIVRDDLLGFALRECPSVLEYKVQAGNSSLYNTPPCFSIYVMGLVLEWIKNNGGAAAMEKLSSIKSQTIYEIIDNSQGFYVCPVEPQNRSKMNIPFRIGNPKGDDALEKRFLDKALELNMLSLKGHRSVGGIRASLYNAVTIEDVQKLAAFMKKFLEMHQL

SEQ ID NO: 1316 - protein, 370 aa, synthetic construct
MDAPRQVVNFGPGPAKLPHSVLLEIQKELLDYKGVGISVLEMSHRSSDFAKIINNTENLVRELLAVPDNYKVIFLQGGGCGQFSAVPLNLIGLKAGRCADYVVTGAWSAKAAAEAKKFGTINIVHPKLGSYTKIPDPSTWNLNPDASYVYYCANETVHGVEFDFIPDVKGAVLVCDMSSNFLSKPVDVSKFGVIFAGAQKNVGSAGVTVVIVRDDLLGFALRECPSVLEYKVQAGNSSLYNTPPCFSIYVMGLVLEWIKNNGGAAAMEKLSSIKSQTIYEIIDNSQGFYVCPVEPQNRSKMNIPFRIGNAKGDDALEKRFLDKALELNMLSLKGHRSVGGIRASLYNAVTIEDVQKLAAFMKKFLEMHQL

SEQ ID NO: 1317 - protein, 370 aa, synthetic construct
MDAPRQVVNFGPGPAKLPHSVLLEIQKELLDYKGVGISVLEMSHRSSDFAKIINNTENLVRELLAIPDNYKVIFLQGGGCGQFSAVPLNLIGLKAGRCADYVVTGAWSAKAAEEAKKFGTINIVHPKLGSYTKIPDPSTWNLNPDASYVYYCANETVHGVEFDFIPDVKGAVLVCDMSSNFLSKPVDVSKFGVIFAGAQKNVGSAGVTVVIVRDDLLGFALRECPSVLEYKVQAGNSSLYNTPPCFSIYVMGLVLEWIKNNGGAAAMEKLSSIKSQTIYEIIDNSQGFYVCPVEPQNRSKMNIPFRIGNAKGDDALEKRFLDKALELNMLSLKGHRSVGGIRASLYNAVTIEDVQKLAAFMKKFLEMHQL

SEQ ID NO: 1318 - protein, 370 aa, synthetic construct
MDAPRQVVNFGPGPAKLPHSVLLEIQKELLDYKGVGISVLEMSHRSSDFAKIINNTENLVRELLAVPDNYKVIFLQGGGCGQFSAVPLNLIGLKAGRCADYVVTGAWSAKAAEEAKKFGTINIVHPKLGSYTKIPDPSTWNLNPDASYVYYCANETVHGVEFDFIPDVKGAVLVCDMSSNFLSKPVDVSKFGVIFAGAQKNVGSAGVTVVIVRDDLLGFALRECPSVLEYKVQAGNSSLYNTPPCFSIYVMGLVLEWIINNGGAAAMEKLSSIKSQTIYEIIDNSQGFYVCPVEPQNRSKMNIPFRIGNAKGDDALEKRFLDKALELNMLSLKGHRSVGGIRASLYNAVTIEDVQKLAAFMKKFLEMHQL

SEQ ID NO: 1319 - protein, 370 aa, synthetic construct
MDAPRQVVNFGPGPAKLPHSVLLEIQKELLDYKGVGISVLEMSHRSSDFAKIINNTENLVRELLAVPDNYKVIFLQGGGCGQFSAVPLNLIGLKAGRCADYVVTGAWSAKAAEEAKKFGTINIVHPKLGSYTKIPDPSTWNLNPDASYVYYCANETVHGVEFDFIPDVKGAVLVCDMSSNFLSKPVDVSKFGVIFAGAQKNVGSAGVTVVIVRDDLLGFALRECPSVLEYKVQAGNSSLYNTPPCFSIYVMGLVLEWIKNNGGAAAMEKLSSIKSQTIYEIIDNSQGFYVCPVEPQNRSKMNIPFRIGNAKGDDALEKRFLDKALELNMLALKGHRSVGGIRASLYNAVTIEDVQKLAAFMKKFLEMHQL

SEQ ID NO: 1320 - protein, 370 aa, synthetic construct
MDAPRQVVNFGPGPAKLPHSVLLEIQKELLDYKGVGISVLEMSHRSSDFAKIINNTENLVRELLAVPDNYKVIFLQGGGCGQFSAVPLNLIGLKAGRCADYVVTGAWSAKAAEEAKKFGTINIVHPKLGSYTKIPDPSTWNLNPDASYVYYCANETVHGVEFDFIPDVKGAVLVCDMSSNFLSKPVDVSKFGVIFAGAQKNVGSAGVTVVIVRDDLLGFALRECPSVLEYKVQAGNSSLYNTPPCFSIYVMGLVLEWIKHNGGAAAMEKLSSIKSQTIYEIIDNSQGFYVCPVEPQNRSKMNIPFRIGNAKGDDALEKRFLDKALELNMLSLKGHRSVGGIRASLYNAVTIEDVQKLAAFMKKFLEMHQL

SEQ ID NO: 1321 - protein, 370 aa, synthetic construct
MDAPRQVVNFGPGPAKLPHSVLLEIQKESLDYKGVGISVLEMSHRSSDFAKIINNTENLVRELLAVPDNYKVIFLQGGGCGQFSAVPLNLIGLKAGRCADYVVTGAWSAKAAEEAKKFGTINIVHPKLGSYTKIPDPSTWNLNPDASYVYYCANETVHGVEFDFIPDVKGAVLVCDMSSNFLSKPVDVSKFGVIFAGAQKNVGSAGVTVVIVRDDLLGFALRECPSVLEYKVQAGNSSLYNTPPCFSIYVMGLVLEWIKNNGGAAAMEKLSSIKSQTIYEIIDNSQGFYVCPVEPQNRSKMNIPFRIGNAKGDDALEKRFLDKALELNMLSLKGHRSVGGIRASLYNAVTIEDVQKLAAFMKKFLEMHQL

SEQ ID NO: 1322 - protein, 370 aa, synthetic construct
MDAPRQVVNFGPGPAKLPHSVLLEIQKELLDYKGVGISVLEMSHRSSDFAKIINNTENLVRELLAVPDNYKVIFLQGGGCGQFSAVPLNLIGLKAGRCADYVVTGAWSAKAAEEAKKFGTINLVHPKLGSYTKIPDPSTWNLNPDASYVYYCANETVHGVEFDFIPDVKGAVLVCDMSSNFLSKPVDVSKFGVIFAGAQKNVGSAGVTVVIVRDDLLGFALRECPSVLEYKVQAGNSSLYNTPPCFSIYVMGLVLEWIKNNGGAAAMEKLSSIKSQTIYEIIDNSQGFYVCPVEPQNRSKMNIPFRIGNAKGDDALEKRFLDKALELNMLSLKGHRSVGGIRASLYNAVTIEDVQKLAAFMKKFLEMHQL

SEQ ID NO: 1323 - protein, 370 aa, synthetic construct
MDAPRQVVNFGPGPAKLPHSVLLEIQKELLDYKGVGISVLEMSHRSSDFAKFINNTENLVRELLAVPDNYKVIFLQGGGCGQFSAVPLNLIGLKAGRCADYVVTGAWSAKAAEEAKKFGTINIVHPKLGSYTKIPDPSTWNLNPDASYVYYCANETVHGVEFDFIPDVKGAVLVCDMSSNFLSKPVDVSKFGVIFAGAQKNVGSAGVTVVIVRDDLLGFALRECPSVLEYKVQAGNSSLYNTPPCFSIYVMGLVLEWIKNNGGAAAMEKLSSIKSQTIYEIIDNSQGFYVCPVEPQNRSKMNIPFRIGNAKGDDALEKRFLDKALELNMLSLKGHRSVGGIRASLYNAVTIEDVQKLAAFMKKFLEMHQL

SEQ ID NO: 1324 - protein, 370 aa, synthetic construct
MDAPRQVVNFGPGPAKLPHSVLLEIQKELLDYKGVGISVLEMSHRSSDFAKIINNTENLVRELLAVPDNYKVIFLQGGGCGQFSAVPLNLIGLKAGRCADYVVTGAWSAKAAEEAKKFGTINIVHPKLGSYTKIPDPSTWNLNPDASYVYYCANETVHGVEFDFIPDVKGAVLVCDMSSNFLSKPVDVSKFGVIFAGAQKNVGSAGVTVVIVRDDLLGFALRECPSVLEYKVQAGNSSLYNTPPCFSIYVMGLVLEWIKNNGGAAAMEKLSSIKSQTIYEIIDNSQGFYVCPVEPQNRSKMNIPFRIGNAKGDDALEKRFLDKALELNMLSLKGHRTVGGIRASLYNAVTIEDVQKLAAFMKKFLEMHQL

SEQ ID NO: 1325 - protein, 370 aa, synthetic construct
MDAPRQVVNFGPGPAKLPHSVLLEIQKELLDYKGVGISVLEMSHRSSDFAKIINNTENLVRELLAVPDNYKVIFLQGGGCGQFSAVPLNLIGLKAGRCADYVVTGAWSAKAAEEAKKFGTINIVHPKLGSYTKIPDPSTWNLNPDASYVYYCANETVHGVEFDFIPDVKGAVLVCDMSSNFLSKPVDVSKFGVIFAGAQKNVGSAGVTVVIVRDDLLGFALRECPSVLEYKVQAGNSSLYNTPPCFSIYVMGLVLEWIKNNGGAAAMEKLSSIKSQTIYEIIDNSQGFYVCPVEPQNRSKMNIPFRIGNAKGDDALEKRFLDKALELNMLSLKGHRSVGGIRASLYNAVTIEDVQKLAAFMKKFLERHQL

SEQ ID NO: 1326 - protein, 370 aa, synthetic construct
MDAPRQVVNFGPGPAKLPHSVLLEIQKELLDYKGVGISVLEMSHRSSDFAKIINNTENLVRELLAVPDNYKVIFLQGGGCGQFSAVPLNVIGLKAGRCADYVVTGAWSAKAAEEAKKFGTINIVHPKLGSYTKIPDPSTWNLNPDASYVYYCANETVHGVEFDFIPDVKGAVLVCDMSSNFLSKPVDVSKFGVIFAGAQKNVGSAGVTVVIVRDDLLGFALRECPSVLEYKVQAGNSSLYNTPPCFSIYVMGLVLEWIKNNGGAAAMEKLSSIKSQTIYEIIDNSQGFYVCPVEPQNRSKMNIPFRIGNAKGDDALEKRFLDKALELNMLSLKGHRSVGGIRASLYNAVTIEDVQKLAAFMKKFLEMHQL

SEQ ID NO: 1327 - protein, 370 aa, synthetic construct
MDAPRQVVNFGPGPAKLPHSVLLEIQKELLDYKGVGISVLEMSHRSSDFAKIINNTENLVRELLAVPDNYKVIFLQGGGCGQFSAVPLNLIGLKAGRCADYVVTGAWSAKAAEEAKKFGTINIVHPKLGSYTKIPDPSTWNLNPDASYVYYCANETVHGVEFDFIPDVKGAVLVCDMSSNFLSKPVDVSKFGVIFAGAQKNVGSAGVTVVIVRDDLLGFALRECPSVLEYQVQAGNSSLYNTPPCFSIYVMGLVLEWIKNNGGAAAMEKLSSIKSQTIYEIIDNSQGFYVCPVEPQNRSKMNIPFRIGNAKGDDALEKRFLDKALELNMLSLKGHRSVGGIRASLYNAVTIEDVQKLAAFMKKFLEMHQL

SEQ ID NO: 1328 - protein, 370 aa, synthetic construct
MDAPRQVVNFGPGPAKLPHSVLLEIQKELLDYKGVGISVLEMSHRSSDFAKIINNTENLVRELLAVPDNYKVIFLQGGGCGQFSAVPLNLIGLKAGRCADYVVTGAWSAKAAEEAKKFGTINIVHPKLGSYTKIPDPSTWNLNPDASYVYYCANETVHGVEFDFIPDVKGAVLVCDMSSNFLSKPVDVSKFGVIFAGAQKNVGSAGVTVVIVRDDLLGVALRECPSVLEYKVQAGNSSLYNTPPCFSIYVMGLVLEWIKNNGGAAAMEKLSSIKSQTIYEIIDNSQGFYVCPVEPQNRSKMNIPFRIGNAKGDDALEKRFLDKALELNMLSLKGHRSVGGIRASLYNAVTIEDVQKLAAFMKKFLEMHQL

SEQ ID NO: 1329 - protein, 370 aa, synthetic construct
MDAPRQVVNFGPGPAKLPHSVLLEIQKELLDYKGVGISVLEMSHRSSDFAKIINNTENLVRELLAVPDNYKVIFLQGGGCGQFSAVPLNLIGLKAGRCADYVVTGAWSAKAAEEAKKFGTINIVHPQLGSYTKIPDPSTWNLNPDASYVYYCANETVHGVEFDFIPDVKGAVLVCDMSSNFLSKPVDVSKFGVIFAGAQKNVGSAGVTVVIVRDDLLGFALRECPSVLEYKVQAGNSSLYNTPPCFSIYVMGLVLEWIKNNGGAAAMEKLSSIKSQTIYEIIDNSQGFYVCPVEPQNRSKMNIPFRIGNAKGDDALEKRFLDKALELNMLSLKGHRSVGGIRASLYNAVTIEDVQKLAAFMKKFLEMHQL

SEQ ID NO: 1330 - protein, 370 aa, synthetic construct
MDAPRQVVNFGPGPAKLPHSVLLEIQKELLDYKGVGISVLEMSHRSSDFAKIINNTENLVRELLAVPDNYKVIFLQGGGCGQFSAVPLNLIGLKAGRCADYVVTGAWSAKAAEEAKKFGTINIVHPKLGSYTKIPDPSTWNLNPDASYVYYCANETVHGVEFDFIPDVKGAVLVCDMSSNFLSKPVDVSKFGVIFAGAQKNVGSAGVTVVIVRGDLLGFALRECPSVLEYKVQAGNSSLYNTPPCFSIYVMGLVLEWIKNNGGAAAMEKLSSIKSQTIYEIIDNSQGFYVCPVEPQNRSKMNIPFRIGNAKGDDALEKRFLDKALELNMLSLKGHRSVGGIRASLYNAVTIEDVQKLAAFMKKFLEMHQL

SEQ ID NO: 1331 - protein, 370 aa, synthetic construct
MDAPRQVVNFGPGPAKLPHSVLLEIQKELLDYKGVGISVLEMSHRSSDFAKIINNTENLVRELLAVPDNYKVIFLQGGGCGQFSAVPLNLIGLKAGRCADYVVTGAWSAKAAEEAKKFGTINIVHHKLGSYTKIPDPSTWNLNPDASYVYYCANETVHGVEFDFIPDVKGAVLVCDMSSNFLSKPVDVSKFGVIFAGAQKNVGSAGVTVVIVRDDLLGFALRECPSVLEYKVQAGNSSLYNTPPCFSIYVMGLVLEWIKNNGGAAAMEKLSSIKSQTIYEIIDNSQGFYVCPVEPQNRSKMNIPFRIGNAKGDDALEKRFLDKALELNMLSLKGHRSVGGIRASLYNAVTIEDVQKLAAFMKKFLEMHQL

SEQ ID NO: 1332 - protein, 370 aa, synthetic construct
MDAPRQVVNFGPGPAKLPHSVLLEIQKELLDYKGVGISVLEMSHRSSDFAKIINNTENLVRELLAVPDNYKVIFLQGGGCGQFSAVPLNLIGLKAGRCADYVVTGAWSAKAAEEAKKFGTINIVHPKLGSYTKIPDPSTWNLNPDASYVYYCANETVHGVEFDFIPDVKGAVLVCDMSSNFLSKPVDVSKFGVIFAGAQKNVGSAGVTVVIVRDDLLGFALRECPSVLEYKVQAGNSSLYNTPPCFSIYVMGLVLEWIKNNGGAAAMEKLSSIKSQTIYEIIDNSQGFYVCPVEPQNRSKMNIPFRIGNAKGDDALEKRFLDKTLELNMLSLKGHRSVGGIRASLYNAVTIEDVQKLAAFMKKFLEMHQL

SEQ ID NO: 1333 - protein, 370 aa, synthetic construct
MDAPRQVVNFGPGPAKLPHSVLLEIQKELLDYKGVGISVLEMSHRSSDFAKIINNTENLVRELLAVPDNYKVIFLQGGGCGQFSAVPLNLIGLKAGRCADYVVTGAWSAKAAEEAKKFGTINIVHPKLGSYTKIPDPSTWNLNPDASYVYYCANETVHGVEFDFIPDVKGAVLVCDMSSNFLSKPVDVSKFGVTFAGAQKNVGSAGVTVVIVRDDLLGFALRECPSVLEYKVQAGNSSLYNTPPCFSIYVMGLVLEWIKNNGGAAAMEKLSSIKSQTIYEIIDNSQGFYVCPVEPQNRSKMNIPFRIGNAKGDDALEKRFLDKALELNMLSLKGHRSVGGIRASLYNAVTIEDVQKLAAFMKKFLEMHQL

SEQ ID NO: 1334 - protein, 370 aa, synthetic construct
MDAPRQVVNFGPGPAKLPHSVLLEIQKELLDYKGVGISVLEMSHRSSDFAKIINNTENLVRELLAVPDNYKVIFLQGGGCGQFSAVPLNLIGLKAGRCADYVVTGAWSAKAAEEAKKFGTINIVHPKLGSYTKIPDPSTWNLNPDASYVYYCANETVHGVEFDFIPDVKGAVLVCDMSSNFLSKPVDVSKFGVIFAGAQKNVGSAGVTVVIVRDDLLGFALRECPSVLEYKVQAGNSSLYNTPPCFSISVMGLVLEWIKNNGGAAAMEKLSSIKSQTIYEIIDNSQGFYVCPVEPQNRSKMNIPFRIGNAKGDDALEKRFLDKALELNMLSLKGHRSVGGIRASLYNAVTIEDVQKLAAFMKKFLEMHQL

SEQ ID NO: 1335 - protein, 370 aa, synthetic construct
MDAPRQVVNFGPGPAKLPHSVLLEIQKELLDYKGVGISVLEMSHRSSDFAKIINNTENLVRELLAVPDNYKVIFLPGGGCGQFSAVPLNLIGLKAGRCADYVVTGAWSAKAAEEAKKFGTINIVHPKLGSYTKIPDPSTWNLNPDASYVYYCANETVHGVEFDFIPDVKGAVLVCDMSSNFLSKPVDVSKFGVIFAGAQKNVGSAGVTVVIVRDDLLGFALRECPSVLEYKVQAGNSSLYNTPPCFSIYVMGLVLEWIKNNGGAAAMEKLSSIKSQTIYEIIDNSQGFYVCPVEPQNRSKMNIPFRIGNAKGDDALEKRFLDKALELNMLSLKGHRSVGGIRASLYNAVTIEDVQKLAAFMKKFLEMHQL

SEQ ID NO: 1336 - protein, 370 aa, synthetic construct
MDAPRQVVNFGPGPAKLPHSVLLEIQKELLDYKGVGSSVLEMSHRSSDFAKIINNTENLVRELLAVPDNYKVIFLQGGGCGQFSAVPLNLIGLKAGRCADYVVTGAWSAKAAEEAKKFGTINIVHPKLGSYTKIPDPSTWNLNPDASYVYYCANETVHGVEFDFIPDVKGAVLVCDMSSNFLSKPVDVSKFGVIFAGAQKNVGSAGVTVVIVRDDLLGFALRECPSVLEYKVQAGNSSLYNTPPCFSIYVMGLVLEWIKNNGGAAAMEKLSSIKSQTIYEIIDNSQGFYVCPVEPQNRSKMNIPFRIGNAKGDDALEKRFLDKALELNMLSLKGHRSVGGIRASLYNAVTIEDVQKLAAFMKKFLEMHQL

SEQ ID NO: 1337 - protein, 370 aa, synthetic construct
MDAPRQVVNFGPGPAKLPHSVLLEIQKELLDYKGVGISVLEMSHRSSDFAKIINNTENLVRELLAVPDNYKVIFLQGGGCGQFSAVPLNLIGLKAGRCADYVVTGAWSAKAAEEAKKFGTINIVHPKLGSYTKIPDPSTWNLNPNASYVYYCANETVHGVEFDFIPDVKGAVLVCDMSSNFLSKPVDVSKFGVIFAGAQKNVGSAGVTVVIVRDDLLGFALRECPSVLEYKVQAGNSSLYNTPPCFSIYVMGLVLEWIKNNGGAAAMEKLSSIKSQTIYEIIDNSQGFYVCPVEPQNRSKMNIPFRIGNAKGDDALEKRFLDKALELNMLSLKGHRSVGGIRASLYNAVTIEDVQKLAAFMKKFLEMHQL

SEQ ID NO: 1338 - protein, 370 aa, synthetic construct
MDAPRQVVNFGPGPAKLPHSVLLEIQKELLDYKGVGISVLEMSHRSSDFAKIINNTENLVRELLAVPDNYKVIFLQAGGCGQFSAVPLNLIGLKAGRCADYVVTGAWSAKAAEEAKKFGTINIVHPKLGSYTKIPDPSTWNLNPDASYVYYCANETVHGVEFDFIPDVKGAVLVCDMSSNFLSKPVDVSKFGVIFAGAQKNVGSAGVTVVIVRDDLLGFALRECPSVLEYKVQAGNSSLYNTPPCFSIYVMGLVLEWIKNNGGAAAMEKLSSIKSQTIYEIIDNSQGFYVCPVEPQNRSKMNIPFRIGNAKGDDALEKRFLDKALELNMLSLKGHRSVGGIRASLYNAVTIEDVQKLAAFMKKFLEMHQL

SEQ ID NO: 1339 - protein, 370 aa, synthetic construct
MDAPRQVVNFGPGPAKLPHSVLLEIQKELLDYKGVGISVLEMSHRSSDFAKIINNTENLVRELLAVPDNYKVIFLQGGGCGQFSAVPLNLIGLKAGRCADYVVTGAWSAKAAEEAKKFGTINIVHPKLGSYTKIPDPSTWNLNPDASYVYYCANETVHGVEFDFIPDVKGAVLVCDMSSNFLSKPVDVSKFGVIFAGAQKNVGSAGVTVVIVRDDLLGFALRECPSVLEYKVQAGNSSLYNTPPCFSIYVMGLVLEWIKNNGGAAAMEKLSSIKSQTIYEIIDNSQGFYVCPVEPQNRSKMNIPFRIGNAKGDEALEKRFLDKALELNMLSLKGHRSVGGIRASLYNAVTIEDVQKLAAFMKKFLEMHQL

SEQ ID NO: 1340 - protein, 370 aa, synthetic construct
MDAPRQVVNFGPGPAKLPHSVLLEIQKELLDYKGVGISVLEMSHRSSDFAKIINNTENLVRELLAVPDNYKVIFLQGGGCGQFSAVPLNLIGLKAGRCADYVVTGAWSAKAAEEAKKFGTINIVHPKLGSYTKIPDPSTWNLNPDASYVYYCANETVHGVEFDFIPDVKGAVLVCDMSSNFLSKPVDVSKFGVIFAGAQKNVGSAGVTVVIVRDDLLGFALRECPSVLEYKVQAGNSSLYNTPPCFSIYVMGLVLEWIKNNGGAAAMEKLSSIKSQTIYEIIDNSQGFYVCPVQPQNRSKMNIPFRIGNAKGDDALEKRFLDKALELNMLSLKGHRSVGGIRASLYNAVTIEDVQKLAAFMKKFLEMHQL

SEQ ID NO: 1341 - protein, 370 aa, synthetic construct
MDAPRQVVNFGPGPAKLPHSVLLEIQKELLDYKGVGISVLEMSHRSSDFAKIINNTENLVRELLAVPDNYKVIFLQGGGCGQFSAVPLNLIGLKAGRCADYVVTGAWSAKAAEEAKKFGTINIVHPELGSYTKIPDPSTWNLNPDASYVYYCANETVHGVEFDFIPDVKGAVLVCDMSSNFLSKPVDVSKFGVIFAGAQKNVGSAGVTVVIVRDDLLGFALRECPSVLEYKVQAGNSSLYNTPPCFSIYVMGLVLEWIKNNGGAAAMEKLSSIKSQTIYEIIDNSQGFYVCPVEPQNRSKMNIPFRIGNAKGDDALEKRFLDKALELNMLSLKGHRSVGGIRASLYNAVTIEDVQKLAAFMKKFLEMHQL

SEQ ID NO: 1342 - protein, 370 aa, synthetic construct
MDAPRQVVNFGPGPAKLPHSVLLEIQKELLDYKGVGISVLEMSHRSSDFAKIINNTENLVRELLAVPDNYKVIFLQGGGCGQFSAVPLNLIGLKAGRCADYVVTGAWSAKAAEEAKKFGTINIVHPKLGSYTKIPDPSTWNLNPDASYVYYCANETVHGVEFDFIPDVKGAVLVCDMSSNFLSKPVDVSKFGVIFAGAQKNVGSAGVTVVIVRDDLLGFALRECPSVLEYKVQAGNSSLYNTPPCFSIYVMGLVLEWIKNNGGAAAMEKLSSIKSQTIYEIIDNSQGFYVCPVEPQNRSKMNIPFRIGNAKGGDALEKRFLDKALELNMLSLKGHRSVGGIRASLYNAVTIEDVQKLAAFMKKFLEMHQL

SEQ ID NO: 1343 - protein, 370 aa, synthetic construct
MDAPRQVVNFGPGPAKLPHSVLLEIQKELLDYKGVGISVLEMSHRSSDFAKIINNTENLVRELLAVPDNYKVIFLQGGGCGQFSAVPLNLIGLKAGRCADYVVTGAWSAKAAEEAKKFGTINIVHPKLGSYTKIPDPNTWNLNPDASYVYYCANETVHGVEFDFIPDVKGAVLVCDMSSNFLSKPVDVSKFGVIFAGAQKNVGSAGVTVVIVRDDLLGFALRECPSVLEYKVQAGNSSLYNTPPCFSIYVMGLVLEWIKNNGGAAAMEKLSSIKSQTIYEIIDNSQGFYVCPVEPQNRSKMNIPFRIGNAKGDDALEKRFLDKALELNMLSLKGHRSVGGIRASLYNAVTIEDVQKLAAFMKKFLEMHQL

SEQ ID NO: 1344 - protein, 370 aa, synthetic construct
MDAPRQVVNFGPGPAKLPHSVLLEIQKELLDYKGVGISVLEMSHRSSDFAKIINNTENLVRELLAVPDNYKVIFLQGGGCGQFSAVPLNLIGLKAGRCADYVVTGAWSAKAAEEAKKFGTINIVHPKLGSYTKIPDPSTWNLNPDASYVYYCANETVHGVEFDFIPDVKGAVLVCDMSSNFLSKPVDVSKFGVIFAGAQKNVGSAGVTVVIVRDDLLGFALRECPSVLEYKVQAGNSSLYNTPPCFSIYVMGLVLEWIKNNGGAAAMEKLSSIKSQTIYEIIDNSQGFYVCPVEPQNRSKMNIPFRIGNAKGDDALEKRFLDKGLELNMLSLKGHRSVGGIRASLYNAVTIEDVQKLAAFMKKFLEMHQL

SEQ ID NO: 1345 - protein, 370 aa, synthetic construct
MDAPRQVVNFGPGPAKLPHSVLLEIQKELLDYKGVGISVLEMSHRSSHFAKIINNTENLVRELLAVPDNYKVIFLQGGGCGQFSAVPLNLIGLKAGRCADYVVTGAWSAKAAEEAKKFGTINIVHPKLGSYTKIPDPSTWNLNPDASYVYYCANETVHGVEFDFIPDVKGAVLVCDMSSNFLSKPVDVSKFGVIFAGAQKNVGSAGVTVVIVRDDLLGFALRECPSVLEYKVQAGNSSLYNTPPCFSIYVMGLVLEWIKNNGGAAAMEKLSSIKSQTIYEIIDNSQGFYVCPVEPQNRSKMNIPFRIGNAKGDDALEKRFLDKALELNMLSLKGHRSVGGIRASLYNAVTIEDVQKLAAFMKKFLEMHQL

SEQ ID NO: 1346 - protein, 370 aa, synthetic construct
MDAPRQVVNFGPGPAKLPHSVLLEIQKELLDYKGVGISVLEMSHRSSDFAKIINNTENLVRELLAVPDNYKVIFLQGGGCGQFSAVPLNLIGLKAGRCADYVVTGAWSAKAAEEAKKFGTINIVHPKLGSYTKIPDPSTWNLNPDASYVYYCANETVHGVEFDFIPDVKGAVLVCDMSSNFLSKPVDVSKFGVIFAGAQKNVGSAGVTVVIVRDDLLGFALRECPSVLEYKVQAGNSSLCNTPPCFSIYVMGLVLEWIKNNGGAAAMEKLSSIKSQTIYEIIDNSQGFYVCPVEPQNRSKMNIPFRIGNAKGDDALEKRFLDKALELNMLSLKGHRSVGGIRASLYNAVTIEDVQKLAAFMKKFLEMHQL

SEQ ID NO: 1347 - protein, 370 aa, synthetic construct
MDAPRQVVNFGPGPAKLPHSVLLEIQKELLDYKGVGISVLEMSHRSSDFAKIINNTENLVRELLAVPNNYKVIFLQGGGCGQFSAVPLNLIGLKAGRCADYVVTGAWSAKAAEEAKKFGTINIVHPKLGSYTKIPDPSTWNLNPDASYVYYCANETVHGVEFDFIPDVKGAVLVCDMSSNFLSKPVDVSKFGVIFAGAQKNVGSAGVTVVIVRDDLLGFALRECPSVLEYKVQAGNSSLYNTPPCFSIYVMGLVLEWIKNNGGAAAMEKLSSIKSQTIYEIIDNSQGFYVCPVEPQNRSKMNIPFRIGNAKGDDALEKRFLDKALELNMLSLKGHRSVGGIRASLYNAVTIEDVQKLAAFMKKFLEMHQL

SEQ ID NO: 1348 - protein, 370 aa, synthetic construct
MDAPRQVVNFGPGPAKLPHSVLLEIQKELLDYKGVGISVLEMSHRSSDFAKIINNTENLVRELLAVPDNYKVIFLQGGGCGQFSAVPLNLIGLKAGRCADYVVTGAWSAKAAEEAKKFGTINIVHPKLASYTKIPDPSTWNLNPDASYVYYCANETVHGVEFDFIPDVKGAVLVCDMSSNFLSKPVDVSKFGVIFAGAQKNVGSAGVTVVIVRDDLLGFALRECPSVLEYKVQAGNSSLYNTPPCFSIYVMGLVLEWIKNNGGAAAMEKLSSIKSQTIYEIIDNSQGFYVCPVEPQNRSKMNIPFRIGNAKGDDALEKRFLDKALELNMLSLKGHRSVGGIRASLYNAVTIEDVQKLAAFMKKFLEMHQL

SEQ ID NO: 1349 - protein, 370 aa, synthetic construct
MDAPRQVVNFGPGPAKLPHSVLLEIQKELLDYKGVGISVLEMSHRSSDFAKIINNTENLVRELLAVPDNYKVIFLQGGGCGQFSAVPLNLIGLKAGRCADYVVTGAWSAKAAEEAKKFGTINIVHPKLGSYTKIPDPSTWNLNPDASYVYYCANETVHGVEFDFIPDVKGAVLVCDMSSNFLSKPVDVSKFGVIFAGAQKNVGSAGVTVVIVRDDLLGFALRECPSVLEYKVQAGNSSLYNTPPCFSIYVMGLVLEWIKNNGGAAAMEKLSSIKSQTIYELIDNSQGFYVCPVEPQNRSKMNIPFRIGNAKGDDALEKRFLDKALELNMLSLKGHRSVGGIRASLYNAVTIEDVQKLAAFMKKFLEMHQL

SEQ ID NO: 1350 - protein, 370 aa, synthetic construct
MDAPRQVVNFGPGPAKLPHSVLLEIQKELLDYKGVGISVLEMSHRSSDFAKIINNTENLVRELLAVPDNYKVIFLQGGGCGQFSAVPLNLIGLKAGRCADYVVTGAWSAKAAEEAKKFGTINIVHPKLGSYTKIPDPSTWNLNPDASYVYYCANETVHGVEFDFIPDVKGAVLVCDMSSNFLSKPVDVSKFGVIFAGAQKNFGSAGVTVVIVRDDLLGFALRECPSVLEYKVQAGNSSLYNTPPCFSIYVMGLVLEWIKNNGGAAAMEKLSSIKSQTIYEIIDNSQGFYVCPVEPQNRSKMNIPFRIGNAKGDDALEKRFLDKALELNMLSLKGHRSVGGIRASLYNAVTIEDVQKLAAFMKKFLEMHQL

SEQ ID NO: 1351 - protein, 370 aa, synthetic construct
MDAPRQVVNFGPGPAKLPHSVLLEIQKELLDYKGVGISVLEMSHRSSDFAKIINNTENLVRELLAVPDNYKVIFLQGGGCGQFSAVPLNLIGLKAGRCADYVVTGAWSAKAAEEAKKFGTINIVHPKLGSYTKIPDPSTWNLNPDASYVYYCANETVHGVEFDFIPDVKGAVLVCDMSSNFLSKPVDVSKFGVIFAGAQKNVGSAGVTVVIVRDDLLGFALRECPSVLEYKVQAGNSSLYNTPPCFSIYVMGLVLEWIKNNGGAAAMEKLSSIKSQTIYEIIDNSQGFYVCPVEPQNRSKMNIPFRIGNAKGDDALEKRFLDKALELNMLSLKGHRSVGGIRASLYNAVTIEDVQKLAAFMKKFSEMHQL

SEQ ID NO: 1352 - protein, 370 aa, synthetic construct
MDAPRQVVNFGPGPAKLPHSVLLEIQKELLDYKGVGISVLEMSHRSSDFAKIINNTENLVRELLAVPDNYKVIFLQGGGCGQFSAVPLNLIGLKAGRCADYVVTGAWSAKAAEEAKKFGTINIVHPKLGSYTKIPDPSTWNLNPDASYVYYCANETVHGVEFDFIPDVKGAVLVCDMSSNFLSKPVDVSKFGVIFAGAQKNVGSAGVTVVIVRDDLLGFALRECPSVLEYKVQAGNSSLYNTPPCFSIYVMGLVLEWIKNNGGAAAMEKLSSIKSQTIYEIIDNSQGFYVCPVEPQNRSKMNIPFRIGNAKGDDALEKRFLAKALELNMLSLKGHRSVGGIRASLYNAVTIEDVQKLAAFMKKFLEMHQL

SEQ ID NO: 1353 - protein, 370 aa, synthetic construct
MDAPRQVVNFGPGPAKLPHSVLLEIQKELLDYKGVGISVLEMSHRSSDFAKIINNTENLVRELLAVPDNYKVIFLQGGGCGQFSAVPLNLIGLKAGRCADYVVTGAWSAKAAEEAKKFGTINIVHPKLGSYTKIPDPSTWNLNPDASYVYYCANETVHGVEFDFIPDVKGAVLVCDMSSNFLSKPVDVSKFGVIFAGAQKNVGSAGVTVVIVRDDLLGFALRECPSVLEYKVQAGNSSLYNTPPCFSIYVMGLVLEWIKNNGGAAAMEKLSSIKSQTIYDIIDNSQGFYVCPVEPQNRSKMNIPFRIGNAKGDDALEKRFLDKALELNMLSLKGHRSVGGIRASLYNAVTIEDVQKLAAFMKKFLEMHQL

SEQ ID NO: 1354 - protein, 370 aa, synthetic construct
MDAPRQVVNFGPGPAKLPHSVLLEIQKELLDYKGVGISVLEMSHRSSDFAKIINNTENLVRELLAVPDNYKVIFLQGGGCGQFSAVPLNLIGLKAGRCADYVVTGAWSAKAAEEAKKFGTINIVHPKLGSYTKIPDPSTWNLNPDASYVYYCANETVHGVEFDFIPDVKGAVLVCDMSSNFLSKPVDVSKFGVIFAGAQKNVGSAGVTVVIVRDDLLGFALRECPSVLEYKVQAGNSSLYNTPPCFSIYVMGLVLEWIKNNGGAAAMEKLSSFKSQTIYEIIDNSQGFYVCPVEPQNRSKMNIPFRIGNAKGDDALEKRFLDKALELNMLSLKGHRSVGGIRASLYNAVTIEDVQKLAAFMKKFLEMHQL

SEQ ID NO: 1355 - protein, 370 aa, synthetic construct
MDAPRQVVNFGPGPAKLPHSVLLEIQKELLDYKGVGISVLEMSHRSSDFAKIINNTENLVRELLAVPDNYKVIFLQGGGCGQFSAVPLNLIGLKAGRCADYVVTGAWSARAAEEAKKFGTINIVHPKLGSYTKIPDPSTWNLNPDASYVYYCANETVHGVEFDFIPDVKGAVLVCDMSSNFLSKPVDVSKFGVIFAGAQKNVGSAGVTVVIVRDDLLGFALRECPSVLEYKVQAGNSSLYNTPPCFSIYVMGLVLEWIKNNGGAAAMEKLSSIKSQTIYEIIDNSQGFYVCPVEPQNRSKMNIPFRIGNAKGDDALEKRFLDKALELNMLSLKGHRSVGGIRASLYNAVTIEDVQKLAAFMKKFLEMHQL

SEQ ID NO: 1356 - protein, 370 aa, synthetic construct
MDAPRQVVNFGPGPAKLPHSVLLEIQEELLDYKGVGISVLEMSHRSSDFAKIINNTENLVRELLAVPDNYKVIFLQGGGCGQFSAVPLNLIGLKAGRCADYVVTGAWSAKAAEEAKKFGTINIVHPKLGSYTKIPDPSTWNLNPDASYVYYCANETVHGVEFDFIPDVKGAVLVCDMSSNFLSKPVDVSKFGVIFAGAQKNVGSAGVTVVIVRDDLLGFALRECPSVLEYKVQAGNSSLYNTPPCFSIYVMGLVLEWIKNNGGAAAMEKLSSIKSQTIYEIIDNSQGFYVCPVEPQNRSKMNIPFRIGNAKGDDALEKRFLDKALELNMLSLKGHRSVGGIRASLYNAVTIEDVQKLAAFMKKFLEMHQL

SEQ ID NO: 1357 - protein, 370 aa, synthetic construct
MDAPRQVVNFGPGPAKLPHSVLLEIQKELLDYKGVGISVLEMSHRSSDFAKIINNTENLVRELLAVPDNYKVIFLQGGGCGQFSAVPLNLIGLKAGRCADYVVTGAWSAKAAEEAKKFGTINIVHPKLGSYTKIPDPSTWNLNPDASYVYYCANETVHGVAFDFIPDVKGAVLVCDMSSNFLSKPVDVSKFGVIFAGAQKNVGSAGVTVVIVRDDLLGFALRECPSVLEYKVQAGNSSLYNTPPCFSIYVMGLVLEWIKNNGGAAAMEKLSSIKSQTIYEIIDNSQGFYVCPVEPQNRSKMNIPFRIGNAKGDDALEKRFLDKALELNMLSLKGHRSVGGIRASLYNAVTIEDVQKLAAFMKKFLEMHQL

SEQ ID NO: 1358 - protein, 370 aa, synthetic construct
MDAPRQVVNFGPGPAKLPHSVLLEIQKELLDYKGVGISVLEMSHRSSDFAKIINNTENLVRELLAVPDNYKVIFLQGGGCGQFSAVPLNLIGLKAGRCADYVVTGAWSAKAAEEAKKFGTINIVHPKLGSYTKIPDPSTWNLNPDASYVYYCANETVHGVEFDFIPDVKGAVLVCDMSSNFLSKPVDVSKFGVIFAGAQKSVGSAGVTVVIVRDDLLGFALRECPSVLEYKVQAGNSSLYNTPPCFSIYVMGLVLEWIKNNGGAAAMEKLSSIKSQTIYEIIDNSQGFYVCPVEPQNRSKMNIPFRIGNAKGDDALEKRFLDKALELNMLSLKGHRSVGGIRASLYNAVTIEDVQKLAAFMKKFLEMHQL

SEQ ID NO: 1359 - protein, 370 aa, synthetic construct
MDAPRQVVNFGPGPAKLPHSVLLEIQKELLDYKGVGISVLEMSHRSSDFAKIINNTENLVRELLAVPDNYKVIFLQGGGCGQFSAVPLNLIGLKAGRCADYVVTGAWSAKAAEEAKKFGTINIVHPKLGSYTKIPDPSTWNLNPDASYVYYCANETVHGVEFDFIPDVKGAVLVCDMSSNFLSKPVDVSKFGVIFAGAQKNVGSAGVTVVIVRDDLLGLALRECPSVLEYKVQAGNSSLYNTPPCFSIYVMGLVLEWIKNNGGAAAMEKLSSIKSQTIYEIIDNSQGFYVCPVEPQNRSKMNIPFRIGNAKGDDALEKRFLDKALELNMLSLKGHRSVGGIRASLYNAVTIEDVQKLAAFMKKFLEMHQL

SEQ ID NO: 1360 - protein, 370 aa, synthetic construct
MDAPRQVVNFGPGPAKLPHSVLLEIQKELLDYKGVGISVLEMSHRSSDFAKIINNTENLVRELLAVPDNYKVIFLQGGGCGQFSAVPLNLIGLKAGRCADYVVTGAWSAKAAEEAKKFGTINIVHPKLGSYTKIPDPSTWNLNPDASYVYYCANETVHGVEFDFIPDVKGAVLVCDMSSNFLSKPVDVSKFGAIFAGAQKNVGSAGVTVVIVRDDLLGFALRECPSVLEYKVQAGNSSLYNTPPCFSIYVMGLVLEWIKNNGGAAAMEKLSSIKSQTIYEIIDNSQGFYVCPVEPQNRSKMNIPFRIGNAKGDDALEKRFLDKALELNMLSLKGHRSVGGIRASLYNAVTIEDVQKLAAFMKKFLEMHQL

SEQ ID NO: 1361 - protein, 370 aa, synthetic construct
MDAPRQVVNFGPGPAKLPHSVLLEIQKELLDYKGVGISVLEMSHRSSDFAKIINNTENLVRELLAVPDNYKVIFLQGGGCGQFSAVPLNLIGLKAGRCADYVVTGAWSAKAAEEAKKFGTINIVHPKLGSYTKIPDPSTWNLNPDASYVYYCANETVHGVEFDFIPDVKGAVLVCDMSSNFLSKPVDVSKFGVIFAGAQKNVGSAGVTVVIVRDDLLGFALRECPSVLEYKVQAGNSSWYNTPPCFSIYVMGLVLEWIKNNGGAAAMEKLSSIKSQTIYEIIDNSQGFYVCPVEPQNRSKMNIPFRIGNAKGDDALEKRFLDKALELNMLSLKGHRSVGGIRASLYNAVTIEDVQKLAAFMKKFLEMHQL

SEQ ID NO: 1362 - protein, 370 aa, synthetic construct
MDAPRQVVNFGPGPAKLPHSVLLEIQKELLDYKGVGISVLEMSHRSSDFAKIINNTENLVRELLAVPDNYKVIFLQGGGCGQFSAVPLNLIGLKAGRCADYVVTGAWSAKAAEEAKKFGTINIVHPKLGSYTKIPDPSTWNLNPDASYVYYCANETVHGVEFDFIPDVKGAVLVCDMSSNFLSKPVDVSKFGVIFAGAQKNVGSAGVTVVIVRDDLLGFALRECPSVLEYKVQAGNSSLYNTPPCFSIYVMGLVLEWIKNNGGAAAMEKLSSIKSQTIYEIIDNSQGFYVCPVEPQNRSKMNIPFRIGNAKGDDALEKRFLDKALELNMLSLKGHRSVGGIRASLYNAVTIEDVQKLAAFMKTFLEMHQL

SEQ ID NO: 1363 - protein, 370 aa, synthetic construct
MDAPRQVVNFGPGPAKLPHSVLLEIQKELLDYKGVGISVLEMSHRSSDFAKIINNTENLVRELLAVPDNYKVIFLQGGGCGQFSAVPLNLIGLKAGRCADYVVTGAWSAKAAEEAKKFGTINIVHPKLGSYTKIPDPSTWNLNPDASYVYYCANETVHGVEFDFIPDVKGAVLVCDMSSNFLSKPVDVSKFGVIFAGAQKNVGSAGVTVVIVRDDLLGFALRECPSVLEYKVQAGNSSLYNTPPCFSIYVMGLVLEWIKNNGGAAAMETLSSIKSQTIYEIIDNSQGFYVCPVEPQNRSKMNIPFRIGNAKGDDALEKRFLDKALELNMLSLKGHRSVGGIRASLYNAVTIEDVQKLAAFMKKFLEMHQL

SEQ ID NO: 1364 - protein, 370 aa, synthetic construct
MDAPRQVVNFGPGPAKLPHSVLLEIQKELLDYKGVGISVLEMSHRSSDFAKIINNTENLVRELLAVPDNYKVIFLQGGGCGQFSAVPLNLIGLKAGRCADYVVTGAWSAKAAEEAKKFGTINIVHPKLGSYTKIPDPSTWNLNPDASYVYYCANETVHGVEFDFIPDVKGAVLVCDMSSNFLSKPVDVSKFGVIFAGAQKNVGSAGVTVVIVRDDLLGFALRECPSVLEYKVQAGNSSLYNTPPCFSVYVMGLVLEWIKNNGGAAAMEKLSSIKSQTIYEIIDNSQGFYVCPVEPQNRSKMNIPFRIGNAKGDDALEKRFLDKALELNMLSLKGHRSVGGIRASLYNAVTIEDVQKLAAFMKKFLEMHQL

SEQ ID NO: 1365 - protein, 370 aa, synthetic construct
MDAPRQVVNFGPGPAKLPHSVLLEIQKELLDYKGVGISVLEMSHRSSDFAKIINNTENLVRELLAVPDNYKVIFLQGGGCGQFSAVPLNLIGLKAGRCADYVVTGAWSAKAAEEAKKFGTINIVHPKLGSYTKIPDPSTWNLDPDASYVYYCANETVHGVEFDFIPDVKGAVLVCDMSSNFLSKPVDVSKFGVIFAGAQKNVGSAGVTVVIVRDDLLGFALRECPSVLEYKVQAGNSSLYNTPPCFSIYVMGLVLEWIKNNGGAAAMEKLSSIKSQTIYEIIDNSQGFYVCPVEPQNRSKMNIPFRIGNAKGDDALEKRFLDKALELNMLSLKGHRSVGGIRASLYNAVTIEDVQKLAAFMKKFLEMHQL

SEQ ID NO: 1366 - protein, 370 aa, synthetic construct
MDAPRQVVNFGPGPAKLPHSVLLEIQKELLGYKGVGISVLEMSHRSSDFAKIINNTENLVRELLAVPDNYKVIFLQGGGCGQFSAVPLNLIGLKAGRCADYVVTGAWSAKAAEEAKKFGTINIVHPKLGSYTKIPDPSTWNLNPDASYVYYCANETVHGVEFDFIPDVKGAVLVCDMSSNFLSKPVDVSKFGVIFAGAQKNVGSAGVTVVIVRDDLLGFALRECPSVLEYKVQAGNSSLYNTPPCFSIYVMGLVLEWIKNNGGAAAMEKLSSIKSQTIYEIIDNSQGFYVCPVEPQNRSKMNIPFRIGNAKGDDALEKRFLDKALELNMLSLKGHRSVGGIRASLYNAVTIEDVQKLAAFMKKFLEMHQL

SEQ ID NO: 1367 - protein, 370 aa, synthetic construct
MDAPRQVVNFGPGPAKLPHSVLLEIQKELLDYKGVGISVLEMSHRSSDFAKIINNTENLVRELLAVPDNYKVIFLQGGGCGQFSAVPLNLIGLKAGRCADYVVTGAWSAKAAEEAKKFGTINIVHPKLGSYTKIPDPSTWNLNPDASYVYYCANETVHGVEFDFIPDVKGAVLVCDMSSNFLSKPVDVSKFGVIFAGAQKNVGSAGVTVVIVRDDLLGFALRECPSVLEYKVQAGNSSLYNTPPCFSIYVMGLVLEWIKNNGGAAAMEKLSSIKSQTIYEIIDNSQGFYVCPVEPQNRSKMNIPFRIGNAKGDDALEKRFLDKALELNMLSLKGHRSVGGIRASLYNAVTIEDVLKLAAFMKKFLEMHQL

SEQ ID NO: 1368 - protein, 370 aa, synthetic construct
MDAPRQVVNFGPGPAKLPHSVLLEIQKELLDYKGVGISVLEMSHRSSDFAKIINNTENLVRELLAVPDNYKVIFLQGGGCGQFSAVPLNLIGLKAGRCADYVVTGAWSAKAAEEAKKFGTINIVHPKLGSYTKIPDPSTWNLNPDASYVYYCANETVHGVEFDFIPDVKGAVLVCDMSSNFLSKPVDVSKFGVIFAGAQKNVGSAGVTVVIVRDDLLGFALRECPSVLEYKVQAGNSSLYNTPPCFSIYVMGLVLEWIKNNGGAAAMEKLSSIKSQTIYQIIDNSQGFYVCPVEPQNRSKMNIPFRIGNAKGDDALEKRFLDKALELNMLSLKGHRSVGGIRASLYNAVTIEDVQKLAAFMKKFLEMHQL

SEQ ID NO: 1369 - protein, 370 aa, synthetic construct
MDAPRQVVNFGPGPAKLPHSVLLEIQKELLDYKGVGISVLEMSHRSSDFAKIINNTENLVRELLAVPDNYKVIFLQGGGCGQFSAVPLNLIGLKAGRCADYVVTGAWSAKAAEEAKKFGTINIVHPKLGSYTKIPDPSTWNLNPDASYVYYCANETVHGVEFDFIPDVKGAVLVCDMSSNFLSKPVDVSKFGVIFVGAQKNVGSAGVTVVIVRDDLLGFALRECPSVLEYKVQAGNSSLYNTPPCFSIYVMGLVLEWIKNNGGAAAMEKLSSIKSQTIYEIIDNSQGFYVCPVEPQNRSKMNIPFRIGNAKGDDALEKRFLDKALELNMLSLKGHRSVGGIRASLYNAVTIEDVQKLAAFMKKFLEMHQL

SEQ ID NO: 1370 - protein, 370 aa, synthetic construct
MDAPRQVVNFGPGPAKLPHSVLLEIQKELLDYKGVGISVLEMSHRSSDFAKIINNTENLVRELLAVPDNYKVIFLQGGGCGQFSAVPLNLIGWKAGRCADYVVTGAWSAKAAEEAKKFGTINIVHPKLGSYTKIPDPSTWNLNPDASYVYYCANETVHGVEFDFIPDVKGAVLVCDMSSNFLSKPVDVSKFGVIFAGAQKNVGSAGVTVVIVRDDLLGFALRECPSVLEYKVQAGNSSLYNTPPCFSIYVMGLVLEWIKNNGGAAAMEKLSSIKSQTIYEIIDNSQGFYVCPVEPQNRSKMNIPFRIGNAKGDDALEKRFLDKALELNMLSLKGHRSVGGIRASLYNAVTIEDVQKLAAFMKKFLEMHQL

SEQ ID NO: 1371 - protein, 370 aa, synthetic construct
MDAPRQVVNFGPGPAKLPHSVLLEIQKELLDYKGVGISVLEMSHRSSDFAKIINNTENLVRELLAVPDNYKVIFLQGGGCGQFSAVPLNLIGLKAGRCADYVVTGAWSAKAAEEAKKFGTINIVHPKLGSYTKIPDPSTWNLNPDASYVYYCANETVHGVEFDFIPDVKGAVLVCDMSSNFLSKPVDVSKFGVIFAGAQKNVGSAGVTVVIVRDDLLGFALRECPSVLEYKVQAGNSSLYNTPPCFSIYVMGLVLELIKNNGGAAAMEKLSSIKSQTIYEIIDNSQGFYVCPVEPQNRSKMNIPFRIGNAKGDDALEKRFLDKALELNMLSLKGHRSVGGIRASLYNAVTIEDVQKLAAFMKKFLEMHQL

SEQ ID NO: 1372 - protein, 370 aa, synthetic construct
MDAPRQVVNFGPGPAKLPHSVLLEIQKELLDYKGVGISVLEMSHRSSDFAKIINNTENLVRELLAVPDNYKVIFLQGGGCGQFSAVPLNLIGLKAGRCADYVVTGAWSAKAAEEAKKFGTINIVHPKLGSYTKIPDPSTWNLNPDASYVYYCANETVHGVEFDFIPDVKGAVLVCDMSSNFLSKPVDVSKFGVIFAGAQKNVGSAGVTVVIVRDDLLGFALRECPSVLEYKVQAGNSSLYNTPPCFSIYVMGLVLEWIKNNGGAAAMEKLSSIKSQTIYEIIDNSQGFYVCPVEPQNRSKMNIPFRIGNAKGDDALEKRFLDTALELNMLSLKGHRSVGGIRASLYNAVTIEDVQKLAAFMKKFLEMHQL

SEQ ID NO: 1373 - protein, 370 aa, synthetic construct
MDAPRQVVNFGPGPAKLPHSVLLEIQKELLDYKGVGISVLEMSHRSSDFAKIINNTENLVRELLAVPDNYKVIFLQGGGCGHFSAVPLNLIGLKAGRCADYVVTGAWSAKAAEEAKKFGTINIVHPKLGSYTKIPDPSTWNLNPDASYVYYCANETVHGVEFDFIPDVKGAVLVCDMSSNFLSKPVDVSKFGVIFAGAQKNVGSAGVTVVIVRDDLLGFALRECPSVLEYKVQAGNSSLYNTPPCFSIYVMGLVLEWIKNNGGAAAMEKLSSIKSQTIYEIIDNSQGFYVCPVEPQNRSKMNIPFRIGNAKGDDALEKRFLDKALELNMLSLKGHRSVGGIRASLYNAVTIEDVQKLAAFMKKFLEMHQL

SEQ ID NO: 1374 - protein, 370 aa, synthetic construct
MDAPRQVVNFGPGPAKLPHSVLLEIQKELLDYKGVGISVLEMSHRSSDFAKIINNTENLVRELLAVPDNYKVIFLQGGGCGQFSAVPLNLIGLKAGRCADYVVTGAWSAKAAEEAKKFGTINIVHPKLGSYTKIPDPSTWNLNPDASYVYYCANETVHGVEFDFIPDVKGAVLVCDMSSNFLSKPVDVSKFGVIFAGAQKNVGSAGVTVVIVRDDLLGFALRECPSVLEYKVQAGNSSLYNTPPCFSIYLMGLVLEWIKNNGGAAAMEKLSSIKSQTIYEIIDNSQGFYVCPVEPQNRSKMNIPFRIGNAKGDDALEKRFLDKALELNMLSLKGHRSVGGIRASLYNAVTIEDVQKLAAFMKKFLEMHQL

SEQ ID NO: 1375 - protein, 370 aa, synthetic construct
MDAPRQVVNFGPGPAKLPHSVLLEIQKELLDYKGVGISVLEMSHRSSDFAKIINNTENLVRELLAVPDNYKVIFLQGGGCGQFSAVPLNLIGLKAGRCADYVVTGAWSAKAAEEAKKFGTINIVHPKLGSYTKIPDPSTWNLNPDASYVYYCANETVHGVEFDFIPDVKGAVLVCDMSSNFLSKPVDVSKFGVIFAGAQKNVGSAGVTVVIVRDDLLGFALRECPSVLEYKVQAGNSSLYNTPPCFSIYVMGLVLEWIKNNGGAAAMEKLSYIKSQTIYEIIDNSQGFYVCPVEPQNRSKMNIPFRIGNAKGDDALEKRFLDKALELNMLSLKGHRSVGGIRASLYNAVTIEDVQKLAAFMKKFLEMHQL

SEQ ID NO: 1376 - protein, 370 aa, synthetic construct
MDAPRQVVNFGPGPAKLPHSVLLEIQKELLDYKGVGISVLEMSHRSSDFAKIINNTENLVRELLAVPDNYKVIFLQGGGCGQFSAVPLNLIGLKAGRCADYVVTGAWSAKAAEEAKKFGTINIVHPKLGSYTKIPDPSTWNLNPDASYVYYCANETVHGVEFDFIPDVKGAVLVCDMSSNFLSKPVDVSKFGVIFAGAQKNVGSAGVTVVIVRDDLLGFALRECPSVLEYKVQAGNSSLYNTPPCFSIYVMDLVLEWIKNNGGAAAMEKLSSIKSQTIYEIIDNSQGFYVCPVEPQNRSKMNIPFRIGNAKGDDALEKRFLDKALELNMLSLKGHRSVGGIRASLYNAVTIEDVQKLAAFMKKFLEMHQL

SEQ ID NO: 1377 - protein, 370 aa, synthetic construct
MDAPRQVVNFGPGPAKLPHSVLLEIQKELLDYKGVGISVLEMSHRSSDFAKIINNTENLVRELLAVPDNYKVIFLQGGGCGQFSAVPLNLIGLKAGRCADYVVTGAWSAKAAEEAKKFGTINIVHPKLGSYTKIPDPSTWNLNPDASYVYYCANETVHGVEFDFIPDVKGAVLVCDMSSNFLSKPVDVSKFGVIFAGAQKNVGSAGVTVVIVRDDLLGFALRECPSVLEYKVQAGNSSLYNTPPCFSIYVMGLVLEWIKNNGGAAAMEKLSSIKSQTIYEIIDNSQGFYVCPVEPQNRSKMNIPFRIGNAKGHDALEKRFLDKALELNMLSLKGHRSVGGIRASLYNAVTIEDVQKLAAFMKKFLEMHQL

SEQ ID NO: 1378 - protein, 370 aa, synthetic construct
MDAPRQVVNFGPGPAKLPHSVLLEIQKELLDYKGVGISVLEMSHRSSDFAKIINNTENLVRELLAVPDNYKVIFLQGGGCGQFSAVPLNLIGLKAGRCADYVVTGAWSAKAAEEAKKFGTINIVHPKLGSYTKIPDPSTWNLNPDASYVYYCANETVHGVEFDFIPDVKGAVLVCDMSSNFLSKPVDVSKFGVIFAGAQKNVGSAGVTVVIVRDDLLGFALRECPSVLEYKVQAGNSSLYNTPPCFSIYVMGLVLEWIKNNGGAAAMEKLSSIKSQTIYEIIDNSQGFYVCPVEPQNRSKMNIRFRIGNAKGDDALEKRFLDKALELNMLSLKGHRSVGGIRASLYNAVTIEDVQKLAAFMKKFLEMHQL

SEQ ID NO: 1379 - protein, 370 aa, synthetic construct
MDAPRQVVNFGPGPAKLPHSVLLEIQKELLDYKGVGISVLEMSHRSSDFAKIINNTENLVRELLAVPDNYKVIFLQGGGCGQFSAVPLNLIGLKAGRCADYVVTGAWSAKAAEEAKKFGTINIVHPKLGSYTKIPDPSTWNLNPDASYVYYCANETVHGVEFDFIPDVKGAVLVCDMSSNFLSKPVDVSKFGVIFAGAQKNVGSAGVTVVIVRDDLLGFALRECPSVLEYKVQAGNSSLYNTPPCFSIYVMGLVLEWIKNNGGAAAMEKHSSIKSQTIYEIIDNSQGFYVCPVEPQNRSKMNIPFRIGNAKGDDALEKRFLDKALELNMLSLKGHRSVGGIRASLYNAVTIEDVQKLAAFMKKFLEMHQL

SEQ ID NO: 1380 - protein, 370 aa, synthetic construct
MDAPRPVVNFGPGPAKLPHSVLLEIQKELLDYKGVGISVLEMSHRSSDFAKIINNTENLVRELLAVPDNYKVIFLQGGGCGQFSAVPLNLIGLKAGRCADYVVTGAWSAKAAEEAKKFGTINIVHPKLGSYTKIPDPSTWNLNPDASYVYYCANETVHGVEFDFIPDVKGAVLVCDMSSNFLSKPVDVSKFGVIFAGAQKNVGSAGVTVVIVRDDLLGFALRECPSVLEYKVQAGNSSLYNTPPCFSIYVMGLVLEWIKNNGGAAAMEKLSSIKSQTIYEIIDNSQGFYVCPVEPQNRSKMNIPFRIGNAKGDDALEKRFLDKALELNMLSLKGHRSVGGIRASLYNAVTIEDVQKLAAFMKKFLEMHQL

SEQ ID NO: 1381 - protein, 370 aa, synthetic construct
MDAPRQVVNFGPGPAKLPHSVLLEIQKELLDYKGVGISVLEMSHRSSDFAKIINNTENLVRELLAVPDNYKVIFLQGGGCGQFSAVPLNLIGLKAGRCADYVVTGAWSAKAAEEAKKFGTINIVHPKLGSYTKIPDPSTWNLNPDASYVYYCANETVHGVEFDFIPDVKGAVLVCDMSSNFLSKPVDVSKFGVIFAGAQKNVGSAGVTVVIVRDDLLGFALRECPSVLEYKVQAGNSSLYNTPPCFSIYVMGLVLEWIKNNGGSAAMEKLSSIKSQTIYEIIDNSQGFYVCPVEPQNRSKMNIPFRIGNAKGDDALEKRFLDKALELNMLSLKGHRSVGGIRASLYNAVTIEDVQKLAAFMKKFLEMHQL

SEQ ID NO: 1382 - protein, 370 aa, synthetic construct
MDAPRQVVNFGPGPAKLPHSVLLEIQKELLDYKGVGISVLEMSHRSSDFAKIINNTENLVRELLAVPDNYKVIFLQGGGCGQFSAVPLNLIGLKAGRCADYVVTGAWSAKAAEEAKKFGTINIVHPKLGSYTKIPDPSTWNLNPDASYVYYCANETVHGVEFDFIPDVKGAVLVCDMSSNFLSKPVDVSKFGVIFAGAQKNVGSAGVTVVMVRDDLLGFALRECPSVLEYKVQAGNSSLYNTPPCFSIYVMGLVLEWIKNNGGAAAMEKLSSIKSQTIYEIIDNSQGFYVCPVEPQNRSKMNIPFRIGNAKGDDALEKRFLDKALELNMLSLKGHRSVGGIRASLYNAVTIEDVQKLAAFMKKFLEMHQL

SEQ ID NO: 1383 - protein, 370 aa, synthetic construct
MDAPRQVVNFGPGPAKLPHSVLLEIQKELLDYKGVGISVLEMSHRSSDFAKIINNTENLVRELLAVPDNYKVIFLQGGGCGQFSAVPLNLIGLKAGRCADYVVTGAWSAKAAEEAKKFGTINIVHPKIGSYTKIPDPSTWNLNPDASYVYYCANETVHGVEFDFIPDVKGAVLVCDMSSNFLSKPVDVSKFGVIFAGAQKNVGSAGVTVVIVRDDLLGFALRECPSVLEYKVQAGNSSLYNTPPCFSIYVMGLVLEWIKNNGGAAAMEKLSSIKSQTIYEIIDNSQGFYVCPVEPQNRSKMNIPFRIGNAKGDDALEKRFLDKALELNMLSLKGHRSVGGIRASLYNAVTIEDVQKLAAFMKKFLEMHQL

SEQ ID NO: 1384 - protein, 370 aa, synthetic construct
MDAPRQVVNFGPGPAKLPHSVLLEIQKELLDYKGVGISVLEMSHRSSDFAKIINNTENLVRELLAVPDNYKVIFLQGGGCGQFSAVPLNLIGLKAGRCADYVVTGAWSAKAAEEAKKFGTINIVHPKLGSYTKIPDPSTWNLNPDASYVYYCANETVHGVEFDFIPDVKGAVLVCDMSSNFLSKPVDVSKFGVIFAGAQKNVGSAGVTVVIVRDDLLGFALRECPSVLEYKVQAGNSSLYNTPPCFSIYVMGLVLEWIKNNGGAAAMEKLSSIKSQTIYEIIDNSQGFYVCPVEPQNRSKMNIPFRIGKAKGDDALEKRFLDKALELNMLSLKGHRSVGGIRASLYNAVTIEDVQKLAAFMKKFLEMHQL

SEQ ID NO: 1385 - protein, 370 aa, synthetic construct
MDAPRQVVNFGPGPAKLPHSVLLEIQKELLDYKGVGISVLEMSHRSSDFAKIINNTENLVRELLAVPDNYKVIFLQGGGCGQFSAIPLNLIGLKAGRCADYVVTGAWSAKAAEEAKKFGTINIVHPKLGSYTKIPDPSTWNLNPDASYVYYCANETVHGVEFDFIPDVKGAVLVCDMSSNFLSKPVDVSKFGVIFAGAQKNVGSAGVTVVIVRDDLLGFALRECPSVLEYKVQAGNSSLYNTPPCFSIYVMGLVLEWIKNNGGAAAMEKLSSIKSQTIYEIIDNSQGFYVCPVEPQNRSKMNIPFRIGNAKGDDALEKRFLDKALELNMLSLKGHRSVGGIRASLYNAVTIEDVQKLAAFMKKFLEMHQL

SEQ ID NO: 1386 - protein, 370 aa, synthetic construct
MDAPRQVVNFGPGPAKLPHSVLLEIQKELLDYKGVGISVLEMSHRSSDFAKIINNTENLVRELLAVPDNYKVIFLQGGGCGQFSAVPLNLIGLKAGRCADYVVTGAWSAKAAEEAKKFGTIDIVHPKLGSYTKIPDPSTWNLNPDASYVYYCANETVHGVEFDFIPDVKGAVLVCDMSSNFLSKPVDVSKFGVIFAGAQKNVGSAGVTVVIVRDDLLGFALRECPSVLEYKVQAGNSSLYNTPPCFSIYVMGLVLEWIKNNGGAAAMEKLSSIKSQTIYEIIDNSQGFYVCPVEPQNRSKMNIPFRIGNAKGDDALEKRFLDKALELNMLSLKGHRSVGGIRASLYNAVTIEDVQKLAAFMKKFLEMHQL

SEQ ID NO: 1387 - protein, 370 aa, synthetic construct
MDAPRQVVNFGPGPAKLPHSVLLEIQKELLDYKGVGISVLEMSHRSSDFAKIINYTENLVRELLAVPDNYKVIFLQGGGCGQFSAVPLNLIGLKAGRCADYVVTGAWSAKAAEEAKKFGTINIVHPKLGSYTKIPDPSTWNLNPDASYVYYCANETVHGVEFDFIPDVKGAVLVCDMSSNFLSKPVDVSKFGVIFAGAQKNVGSAGVTVVIVRDDLLGFALRECPSVLEYKVQAGNSSLYNTPPCFSIYVMGLVLEWIKNNGGAAAMEKLSSIKSQTIYEIIDNSQGFYVCPVEPQNRSKMNIPFRIGNAKGDDALEKRFLDKALELNMLSLKGHRSVGGIRASLYNAVTIEDVQKLAAFMKKFLEMHQL

SEQ ID NO: 1388 - protein, 370 aa, synthetic construct
MDAPRQVVNFGPGPAKLPHSVLLEIQKELLDYKGVGISVLEMSHRSSDFAKIINNTENLVRELLAVPDNYKVIFLQGGGCGQFSAVPLNLIGLKAGRCADYVVTGAWSAKAAEEAKKFGTINIVHPKLGSYTKIPDPSTWNLNPDASYVYYCANETVHGVEFDFIPDVKGAVLVCDMSSNFLSKPVDVSKFGVIFAGAQKNVGSAGVTVVIVRDDLLGFALRECPSVLEYKVQAGNSSLYNTPPCFSIYVMGLVLEWIKNNGGAAAMEKLSSIKSQTIYEIIDNSQGFYVCPVEPQNRSKMNIPFRIGNAKGDDALEKRFLDKALELNMLSLKGHRSVGGIRASLYNAVTIEDVQKLAAFMKKFLEVHQL

SEQ ID NO: 1389 - protein, 370 aa, synthetic construct
MDAPRQVVNFGPGPAKLPNSVLLEIQKELLDYKGVGISVLEMSHRSSDFAKIINNTENLVRELLAVPDNYKVIFLQGGGCGQFSAVPLNLIGLKAGRCADYVVTGAWSAKAAEEAKKFGTINIVHPKLGSYTKIPDPSTWNLNPDASYVYYCANETVHGVEFDFIPDVKGAVLVCDMSSNFLSKPVDVSKFGVIFAGAQKNVGSAGVTVVIVRDDLLGFALRECPSVLEYKVQAGNSSLYNTPPCFSIYVMGLVLEWIKNNGGAAAMEKLSSIKSQTIYEIIDNSQGFYVCPVEPQNRSKMNIPFRIGNAKGDDALEKRFLDKALELNMLSLKGHRSVGGIRASLYNAVTIEDVQKLAAFMKKFLEMHQL

SEQ ID NO: 1390 - protein, 370 aa, synthetic construct
MDAPRQVVNFGPGPAKLPHSVLLEIQKELLDYKGVGISVLEMSHRSSDFAKIINNTENLVRELLAVPDNYKVIFLQGGGCGQFSAVPLNLIGLKAGRCADYVVTGAWSAKAAEEAKKFGTINIVHPKLGSYTKIPDPSTWNLNPDASYVYYCANETVHGVEFDFIPDVKGAELVCDMSSNFLSKPVDVSKFGVIFAGAQKNVGSAGVTVVIVRDDLLGFALRECPSVLEYKVQAGNSSLYNTPPCFSIYVMGLVLEWIKNNGGAAAMEKLSSIKSQTIYEIIDNSQGFYVCPVEPQNRSKMNIPFRIGNAKGDDALEKRFLDKALELNMLSLKGHRSVGGIRASLYNAVTIEDVQKLAAFMKKFLEMHQL

SEQ ID NO: 1391 - protein, 370 aa, synthetic construct
MDAPRQVVNFGPGPAKLPHSVLLEIQKELLDYKGVGISVLEMSHRSSDFAKIINNTENLVRELLAVPDNYKVIFLQGGGCGQFSAVPLNLIGLKAGRCADYVVTGAWSAKAAEEAKKFGTINIVHPKLGSYTKIPDPSTWNLNPDASYVYYCANETVHGVEFDFIPDVKGAVLVCDMSSNFLSKPVDVSKFGVIFAGAQKNVGSAGVTVVIVRDDLLGFALRECPSVLEYKVQAGNSSLYNTPPCFSIYVMGLVLEWIKNNGGAAAMEKLSSIKSQTIYEIIDNSQGFYVCPVEPQNRSKMNIPFRIGNAKGDDALEKRFLDKALELNMLSLKGHRSVGGIRASLYNAVTIEDVQKLAAFMKKFLEMNQL

SEQ ID NO: 1392 - protein, 370 aa, synthetic construct
MDAPRQVVNFGPGPAKLPHSVLLEIQKELLDYKGVGISVLEMSHRSSDFAKIINNTENLVRELLAVPDNYKVIFLQGGGCGQFSAVPLNLIGLKAGRCADYVVTGAWSAKAAEEAKKFGTINIVHPKLGSYTKIPDPSTWNLNPDASYVYYCANETVHGVEFDFIPDVKGAVLVCDMSSNFLSTPVDVSKFGVIFAGAQKNVGSAGVTVVIVRDDLLGFALRECPSVLEYKVQAGNSSLYNTPPCFSIYVMGLVLEWIKNNGGAAAMEKLSSIKSQTIYEIIDNSQGFYVCPVEPQNRSKMNIPFRIGNAKGDDALEKRFLDKALELNMLSLKGHRSVGGIRASLYNAVTIEDVQKLAAFMKKFLEMHQL

SEQ ID NO: 1393 - protein, 370 aa, synthetic construct
MDAPRQVVNFGPGPATLPHSVLLEIQKELLDYKGVGISVLEMSHRSSDFAKIINNTENLVRELLAVPDNYKVIFLQGGGCGQFSAVPLNLIGLKAGRCADYVVTGAWSAKAAEEAKKFGTINIVHPKLGSYTKIPDPSTWNLNPDASYVYYCANETVHGVEFDFIPDVKGAVLVCDMSSNFLSKPVDVSKFGVIFAGAQKNVGSAGVTVVIVRDDLLGFALRECPSVLEYKVQAGNSSLYNTPPCFSIYVMGLVLEWIKNNGGAAAMEKLSSIKSQTIYEIIDNSQGFYVCPVEPQNRSKMNIPFRIGNAKGDDALEKRFLDKALELNMLSLKGHRSVGGIRASLYNAVTIEDVQKLAAFMKKFLEMHQL

SEQ ID NO: 1394 - protein, 370 aa, synthetic construct
MDAPRQVVNFGPGPAKLPHSVLLEIQKELLDYKGVGISVLEMSHRSSDFAKIINNTENLVRELLAVPDNYKVIFLQGGGCGQFSAVPLNLIGLKAGRCADYVVTGAWSAKAAEEAKKFGTINIVHPKLGSYTKIPNPSTWNLNPDASYVYYCANETVHGVEFDFIPDVKGAVLVCDMSSNFLSKPVDVSKFGVIFAGAQKNVGSAGVTVVIVRDDLLGFALRECPSVLEYKVQAGNSSLYNTPPCFSIYVMGLVLEWIKNNGGAAAMEKLSSIKSQTIYEIIDNSQGFYVCPVEPQNRSKMNIPFRIGNAKGDDALEKRFLDKALELNMLSLKGHRSVGGIRASLYNAVTIEDVQKLAAFMKKFLEMHQL

SEQ ID NO: 1395 - protein, 370 aa, synthetic construct
MDAPRQVVNFGPGPAKLPHSVLLEIQKELLDYKGVGISVLEMSHRSSDFAKIINNTENLVRELLAVPDNYKVIFLQGGGCGQFSAVPLNLIGLKAGKCADYVVTGAWSAKAAEEAKKFGTINIVHPKLGSYTKIPDPSTWNLNPDASYVYYCANETVHGVEFDFIPDVKGAVLVCDMSSNFLSKPVDVSKFGVIFAGAQKNVGSAGVTVVIVRDDLLGFALRECPSVLEYKVQAGNSSLYNTPPCFSIYVMGLVLEWIKNNGGAAAMEKLSSIKSQTIYEIIDNSQGFYVCPVEPQNRSKMNIPFRIGNAKGDDALEKRFLDKALELNMLSLKGHRSVGGIRASLYNAVTIEDVQKLAAFMKKFLEMHQL

SEQ ID NO: 1396 - protein, 370 aa, synthetic construct
MDAPRQVVNFGPGPAKLPHSVLLEIQKELLDYKGVGISVLEMSHRSSDFAKIINNTENLVRELLAVPDNYKVIFLQGGGCGQFSAVPLNLIGLKAGRCADYVVTGAWSAKAAEEAKKFGTINIVHPKLGSYTKIPDPSTWNLNPDASYVYYCANETVHGVEFDFIPDVKGAVLVCDMSSNFLSKPVDVSKFGVIFAGAQKNVGSAGVTVVIVRDDLLGFALRECPSVLEYKVQAGNSSLYNTPPCFSIYVMGLVLEWIKNNGGAATMEKLSSIKSQTIYEIIDNSQGFYVCPVEPQNRSKMNIPFRIGNAKGDDALEKRFLDKALELNMLSLKGHRSVGGIRASLYNAVTIEDVQKLAAFMKKFLEMHQL

SEQ ID NO: 1397 - protein, 370 aa, synthetic construct
MDAPRQVVNFGPGPAKLPHSVLLEIQKELLDYKGVGISVLEMSHRSSDFAKIINNTENLVRELLAVPDNYKVIFLQGGGCGQFSAVPLNLIGLKAGRCADYVVTGAWSAKAAEEAKKFGTINIVHPKLGSYTKIPDPSTWNLNPDASYVYYCANETVHGVEFDFIPDVKGAVLVCDMSSNFLSKPVDVSKFGVIFAGAQKNVGSAGVTVVIVRDDLLGFALRECPSVLEYKVQAGNSSLYNTPPCFSIYVMGLVLEWIKNNGGAAAMEKLSSIKSQTIYEIIDNSQGFYVCPVEPQNRSKMNIPFRIGNAKGDDALEKRFLDKALELNMLSLKGHTSVGGIRASLYNAVTIEDVQKLAAFMKKFLEMHQL

SEQ ID NO: 1398 - protein, 370 aa, synthetic construct
MDAPRQVVNFGPGPAKLPHSVLLEIQKELLDYKGVGISVLEMSHRSSDFAKIINNTENLVRELLAVPDNYKVIFLQGGGCGQFSAVPLNLIGLKAGRCADYVVTGAWSAKAAEEAKKFGTINIVHPKLGSYTKIPDPSTWNLNPDASYVYYCANETVHGVEFDFIPDVKGAVLVCDMSSNFLSKPVDVSKFGVIFAGAQKNVGSAGVTVVIVRDDLLGFALRECPSVLEYKVQAGNSSLYNTPPCFSIYVMGLVLEWIKINGGAAAMEKLSSIKSQTIYEIIDNSQGFYVCPVEPQNRSKMNIPFRIGNAKGDDALEKRFLDKALELNMLSLKGHRSVGGIRASLYNAVTIEDVQKLAAFMKKFLEMHQL

SEQ ID NO: 1399 - protein, 370 aa, synthetic construct
MDAPRQVVNFGPGPAKLPHSVLLEIQKELLDYKGVGISVLEMSHRSSDFAKIINNTENLVRELLAVPDNYKVIFLQGGGCGQFSAVPLNLIGLKAGRCADYVVTGAWSAKAAEEAKKFGTINIVHPKLGSYTKIPDPSTWNLNPDASYVYYCANETVHGVEFDFIPDVKGAVLVCDMSSNFLSKPVDVSKFGVIFAGAQKNVGSAGVTVVIVRDDLLGFALRECPSVLEYKVQAGNSSLYNTPPCFSIYVMGLVLEWIKYNGGAAAMEKLSSIKSQTIYEIIDNSQGFYVCPVEPQNRSKMNIPFRIGNAKGDDALEKRFLDKALELNMLSLKGHRSVGGIRASLYNAVTIEDVQKLAAFMKKFLEMHQL

SEQ ID NO: 1400 - protein, 370 aa, synthetic construct
MNAPRQVVNFGPGPAKLPHSVLLEIQKELLDYKGVGISVLEMSHRSSDFAKIINNTENLVRELLAVPDNYKVIFLQGGGCGQFSAVPLNLIGLKAGRCADYVVTGAWSAKAAEEAKKFGTINIVHPKLGSYTKIPDPSTWNLNPDASYVYYCANETVHGVEFDFIPDVKGAVLVCDMSSNFLSKPVDVSKFGVIFAGAQKNVGSAGVTVVIVRDDLLGFALRECPSVLEYKVQAGNSSLYNTPPCFSIYVMGLVLEWIKNNGGAAAMEKLSSIKSQTIYEIIDNSQGFYVCPVEPQNRSKMNIPFRIGNAKGDDALEKRFLDKALELNMLSLKGHRSVGGIRASLYNAVTIEDVQKLAAFMKKFLEMHQL

SEQ ID NO: 1401 - protein, 370 aa, synthetic construct
MDAPRQVVNFGPGPAKLPHSVLLEIQKELLDYKGVGISVLEMSHRSSDFAKIINNTENLVRELLAVPDNYKVIFLQGGGCGQFSAVPLNLIGLKAGRCADYVVTGAWSAKAAEEAKKFGTINIVHPKLGSYTKIPDPSTWNLNPDASYVYYCANETVHGVEFDFIPDVKGAVLVCDMSSNFLSKPVDVSKFGVIFAGAQKNVGSAGVTVVIVRDDLLGFALRECPSVLEYKVQAGNSSLYNTPPCFSIYVMGLVLEWIKNNGGAAAMEKLSFIKSQTIYEIIDNSQGFYVCPVEPQNRSKMNIPFRIGNAKGDDALEKRFLDKALELNMLSLKGHRSVGGIRASLYNAVTIEDVQKLAAFMKKFLEMHQL

SEQ ID NO: 1402 - protein, 370 aa, synthetic construct
MDAPRQVVNFGPGPAKLPHSVLLEIQKELLDYKGVGISVLEMSHRSSDFAKIINNTENLVRELLAVPDNYKVIFLQGGGCGQFSAVPLNLIGLKAGRCADYVVTGAWSAKAAEEAKKFGTINIVHPKLGSYTKIPDPSTWNLNPDASYVYYCANETVHGVEFDFIPDVKGAVLVCDMSSNFLSKPVDVSKFGVIFAGAQKNVGSAGVTVVIVRDDLLGFALRECPSVLEYKVQAGNSSLYNTPPCFSIYVMGLVLEWIKNNGGAAAMEKLSSIKSQTIYEIIDNSQGFYVCPVEPQNRSKMNIPFRIGNAKGDDALEKRFLDKALELNMLSLKGHRSVGGIRASLYNAVTLEDVQKLAAFMKKFLEMHQL

SEQ ID NO: 1403 - protein, 370 aa, synthetic construct
MDAPRQVVNFGPGPAKLPHSVLLEIQKELLDYKGVGISVLEMSHRSSDFAKIINNTENLVRELLAVPDNYKVIFLQGGGCGQFSAVPLNLIGLKAGRCADYVVTGAWSAKAAEEAKKFGTINIVHPKLGSYTKIPDPSTWNLNPDASYVYYCANETVHGVEFDFIPDVKGAVLVCDMSSNFLSKPVDVSKFGVIFAGAQKNVGSAGVTVVIVRDDLLGFALRECPSVLEYKVQAGNSSLYNTPPCFSIYVMGLVLEWIKNNGGAAAMEKLSSIKSQTIYEIIDNSQGFYVCPVEPQNRSKMNIPFRIGNAKGDDALEKRFLDKALELNLLSLKGHRSVGGIRASLYNAVTIEDVQKLAAFMKKFLEMHQL

SEQ ID NO: 1404 - protein, 370 aa, synthetic construct
MDAPRQVVNFGPGPAKLPHSVLLEIQKELLDYKGVGISVLEMSHRSSDFAKIINNTENLVRELLAVPDNYKVIFLQGGGCGQFSAVPLNLIGLKAGRCADYVVTGAWSAKAAEEAKKFGTINIVHPKLGSYTKIPDPSTWNLNPDASYVYYCANETVHGVEFDFIPDVKGAVLVCDMSSNFLSKPVDVSKFGVIFAGAQKNVGSAGVTVVIVRDDLLGFALRECPSVLEYKVQAGNSSLYNTPPCFSIYVMGLVLEWIKNNGGAAAMEKLSSIKSQTIYEIIDNSQGFYVCPVEPQNRSKMNIPFRIGNAKGDDALEKRFVDKALELNMLSLKGHRSVGGIRASLYNAVTIEDVQKLAAFMKKFLEMHQL

SEQ ID NO: 1405 - protein, 370 aa, synthetic construct
MDAPRQVVNFGPGPAKLPHSVLLEIQKELLDYKGVGISVLEMSHRSSDFAKIINNTENLVRELLAVPDNYKVIFLQGGGCGQFSAVPLNLIGLKAGRCADYVVTGAWSAKAAEEAKKFGTINIVHPKLGSYTKIPDPSTWNLNPDASYVYYCANETVHGVEFDFIPDVKGAVLVCDMSSNFLSKPVDVSKFGVIFAGAQKNVGSAGVTVVIVRDDLLGFALRECPSVLEYKVQAGNSSLYNTPPCFSIYVMGLVLEWIKNNGGAAAMEKLSSIKSQTIYEIIDNSQGFYVCPVEPQNRSKMNIPFRIGNAKGDDALEKRFLDKALELNMLSLKGHRSVGGIRVSLYNAVTIEDVQKLAAFMKKFLEMHQL

SEQ ID NO: 1406 - protein, 370 aa, synthetic construct
MDAPRQVVNFGPGPAKLPHSVLLEIQKELLDYKGVGISVLEMSHRSSDFAKIINNTENLVRELLAVPDNYKVIFLQGGGCGQFSAVPLNLIGLKAGRCADYVVTGAWSAKAAEEAKKFGTINIVHPKLESYTKIPDPSTWNLNPDASYVYYCANETVHGVEFDFIPDVKGAVLVCDMSSNFLSKPVDVSKFGVIFAGAQKNVGSAGVTVVIVRDDLLGFALRECPSVLEYKVQAGNSSLYNTPPCFSIYVMGLVLEWIKNNGGAAAMEKLSSIKSQTIYEIIDNSQGFYVCPVEPQNRSKMNIPFRIGNAKGDDALEKRFLDKALELNMLSLKGHRSVGGIRASLYNAVTIEDVQKLAAFMKKFLEMHQL

SEQ ID NO: 1407 - protein, 370 aa, synthetic construct
MDAPRQVVNFGPGPAKLPHSVLLEIQKELLDYKGVGISVLEMSHRSSDFAKIIKNTENLVRELLAVPDNYKVIFLQGGGCGQFSAVPLNLIGLKAGRCADYVVTGAWSAKAAEEAKKFGTINIVHPKLGSYTKIPDPSTWNLNPDASYVYYCANETVHGVEFDFIPDVKGAVLVCDMSSNFLSKPVDVSKFGVIFAGAQKNVGSAGVTVVIVRDDLLGFALRECPSVLEYKVQAGNSSLYNTPPCFSIYVMGLVLEWIKNNGGAAAMEKLSSIKSQTIYEIIDNSQGFYVCPVEPQNRSKMNIPFRIGNAKGDDALEKRFLDKALELNMLSLKGHRSVGGIRASLYNAVTIEDVQKLAAFMKKFLEMHQL

SEQ ID NO: 1408 - protein, 370 aa, synthetic construct
MDAPRQVVNFGPGPAKLPHSVLLEIQKELLDYKGVGISVLEMSHRSSDFAKIINNTENLVRELLAVPDNYKVIFLQGGGCGQFSAVPLNLIGLKAGRCADYVVTGAWSATAAEEAKKFGTINIVHPKLGSYTKIPDPSTWNLNPDASYVYYCANETVHGVEFDFIPDVKGAVLVCDMSSNFLSKPVDVSKFGVIFAGAQKNVGSAGVTVVIVRDDLLGFALRECPSVLEYKVQAGNSSLYNTPPCFSIYVMGLVLEWIKNNGGAAAMEKLSSIKSQTIYEIIDNSQGFYVCPVEPQNRSKMNIPFRIGNAKGDDALEKRFLDKALELNMLSLKGHRSVGGIRASLYNAVTIEDVQKLAAFMKKFLEMHQL

SEQ ID NO: 1409 - protein, 370 aa, synthetic construct
MDAPRQVVNFGAGPAKLPHSVLLEIQKELLDYKGVGISVLEMSHRSSDFAKIINNTENLVRELLAVPDNYKVIFLQGGGCGQFSAVPLNLIGLKAGRCADYVVTGAWSAKAAEEAKKFGTINIVHPKLGSYTKIPDPSTWNLNPDASYVYYCANETVHGVEFDFIPDVKGAVLVCDMSSNFLSKPVDVSKFGVIFAGAQKNVGSAGVTVVIVRDDLLGFALRECPSVLEYKVQAGNSSLYNTPPCFSIYVMGLVLEWIKNNGGAAAMEKLSSIKSQTIYEIIDNSQGFYVCPVEPQNRSKMNIPFRIGNAKGDDALEKRFLDKALELNMLSLKGHRSVGGIRASLYNAVTIEDVQKLAAFMKKFLEMHQL

SEQ ID NO: 1410 - protein, 370 aa, synthetic construct
MDAPRQVVNFGPGPAKLPHSVLLEIQKELLDYKGVGISVLEMSHRSSDFAKIINNTENLVRELLAVPDNYKVIFLQGGGCGQFSAVPLNLIGLKAGRCADYVVTGAWSAKAAEEAKKFGTINIVHPKLGSYTKIPDPSTWNLNPDASYVYYCANETVHGVEFDFIPDVKGAVLVCDMSSNFLSKPVDVSKFGVIFAGAQKNVGSAGVTVVIVRDDLLGFALRECPSVLEYKVQAGNSSLYNTPPCFSIYVMGLVLEWIKNNGGAAAMEKLSSIKSQTIYEIIDTSQGFYVCPVEPQNRSKMNIPFRIGNAKGDDALEKRFLDKALELNMLSLKGHRSVGGIRASLYNAVTIEDVQKLAAFMKKFLEMHQL

SEQ ID NO: 1411 - protein, 370 aa, synthetic construct
MDAPRQVVNFGPGPAKLPHSVLLEIQKELLDYKGVGISVLEMSHRSSDFAKIINNTENLVRELLAVPDNYKVVFLQGGGCGQFSAVPLNLIGLKAGRCADYVVTGAWSAKAAEEAKKFGTINIVHPKLGSYTKIPDPSTWNLNPDASYVYYCANETVHGVEFDFIPDVKGAVLVCDMSSNFLSKPVDVSKFGVIFAGAQKNVGSAGVTVVIVRDDLLGFALRECPSVLEYKVQAGNSSLYNTPPCFSIYVMGLVLEWIKNNGGAAAMEKLSSIKSQTIYEIIDNSQGFYVCPVEPQNRSKMNIPFRIGNAKGDDALEKRFLDKALELNMLSLKGHRSVGGIRASLYNAVTIEDVQKLAAFMKKFLEMHQL

SEQ ID NO: 1412 - protein, 370 aa, synthetic construct
MDAPRQVVNFGPGPAKLPHSVLLEIQKELLDYKGVGISVLEMSHRSSDFAKIINNTENLVRELLAVPDNYKVIFLQGGGCGQFSAVPLNLIGLKAGRCADYVVTGAWSAKAAEEAKKFGTINIVHPKLGSYTKIPDPSTWNLNPDASYVYYCANETVHGVEFDFIPDVKGAVLVCDMSSNFLSKPVDVSKFGVIFAGAQKNVGSAGVTVVIVRDDLLGFALRECPSVLEYKVQAGNSSLYNTPPCFSIYGMGLVLEWIKNNGGAAAMEKLSSIKSQTIYEIIDNSQGFYVCPVEPQNRSKMNIPFRIGNAKGDDALEKRFLDKALELNMLSLKGHRSVGGIRASLYNAVTIEDVQKLAAFMKKFLEMHQL

SEQ ID NO: 1413 - protein, 370 aa, synthetic construct
MDAPRQVVNFGPGPAKLPHSVLLEIQKELLDYKGVGISVLEMSHRSSDFAKIINNTENLVRELLAVPDNYKVIFLQGGGCGQFSAVPLNLIGLKAGRCADYVVTGAWSAKAAEEAKKFGTINIVHPKLGSYTKIPDPSTWNLNPDASYVYYCANETVHGVEFDFIPDVKGAVLVCDMSSNFLSKPVDVSKFGVIFAGAQKNVGSAGVTVVIVRDDLLGFALRECPSVLEYKVQAGSSSLYNTPPCFSIYVMGLVLEWIKNNGGAAAMEKLSSIKSQTIYEIIDNSQGFYVCPVEPQNRSKMNIPFRIGNAKGDDALEKRFLDKALELNMLSLKGHRSVGGIRASLYNAVTIEDVQKLAAFMKKFLEMHQL

SEQ ID NO: 1414 - protein, 370 aa, synthetic construct
MDGPRQVVNFGPGPAKLPHSVLLEIQKELLDYKGVGISVLEMSHRSSDFAKIINNTENLVRELLAVPDNYKVIFLQGGGCGQFSAVPLNLIGLKAGRCADYVVTGAWSAKAAEEAKKFGTINIVHPKLGSYTKIPDPSTWNLNPDASYVYYCANETVHGVEFDFIPDVKGAVLVCDMSSNFLSKPVDVSKFGVIFAGAQKNVGSAGVTVVIVRDDLLGFALRECPSVLEYKVQAGNSSLYNTPPCFSIYVMGLVLEWIKNNGGAAAMEKLSSIKSQTIYEIIDNSQGFYVCPVEPQNRSKMNIPFRIGNAKGDDALEKRFLDKALELNMLSLKGHRSVGGIRASLYNAVTIEDVQKLAAFMKKFLEMHQL

SEQ ID NO: 1415 - protein, 370 aa, synthetic construct
MDAPRQVVNFGPGPAKLPHSVLLEIQKELLDYKGVGISVLEMSHRSSDFAKIINNTENLVRELLAVPDNYKVIFLQGGGCGQFSAVPLNLIGLKAGRCADYVVTGAWSAKAAEEAKKFGTINIVHPKLGSYTRIPDPSTWNLNPDASYVYYCANETVHGVEFDFIPDVKGAVLVCDMSSNFLSKPVDVSKFGVIFAGAQKNVGSAGVTVVIVRDDLLGFALRECPSVLEYKVQAGNSSLYNTPPCFSIYVMGLVLEWIKNNGGAAAMEKLSSIKSQTIYEIIDNSQGFYVCPVEPQNRSKMNIPFRIGNAKGDDALEKRFLDKALELNMLSLKGHRSVGGIRASLYNAVTIEDVQKLAAFMKKFLEMHQL

SEQ ID NO: 1416 - protein, 370 aa, synthetic construct
MDAPRQVVNFGPGPAKLPHSVLLEIQKELLDYKGVGISVLEMSHRSSDFAKIINNTENLVRELLAVPDNYKVIFLQGGGCGQFSAVPLNLIGLKAGRCADYVVTGAWSAKAAEEAKKFGTINIVHPKLGSYTKIPDPSTWNLNPDASYVYYCANETVHGVEFDFIPDVKGAVLVCDMSSNFLSKPVDVSKFGVIFAGAQKNVGSAGVTVVIVRDDLLGFALRECPSVLEYKVQAGNSSLYNTPPCFSIYVMGLVLEWIKNNGGAAAMEKLSSIKSQTIYEIIDNSQGFYVCPVEPQNRSKMNIPFRIGNAKGDDALEKRFLDKALELNMLSLKGHRSVGGIRASLYNAVTIEDFQKLAAFMKKFLEMHQL

SEQ ID NO: 1417 - protein, 370 aa, synthetic construct
MDAPRQVVNFGPGPAKLPHSVLLEIQKELLDYKGVGISVLEMSHRSSDFAKIINNTENLVRELLAVPDNYKVIFLQGGGCGQFSAVPLNLIGLKAGRCADYVVTGAWSAKAAEEAKKFGTINIVHPKLGSYSKIPDPSTWNLNPDASYVYYCANETVHGVEFDFIPDVKGAVLVCDMSSNFLSKPVDVSKFGVIFAGAQKNVGSAGVTVVIVRDDLLGFALRECPSVLEYKVQAGNSSLYNTPPCFSIYVMGLVLEWIKNNGGAAAMEKLSSIKSQTIYEIIDNSQGFYVCPVEPQNRSKMNIPFRIGNAKGDDALEKRFLDKALELNMLSLKGHRSVGGIRASLYNAVTIEDVQKLAAFMKKFLEMHQL

SEQ ID NO: 1418 - protein, 370 aa, synthetic construct
MDAPRQVVNFGPGPAKLPHSVLLEIQKELLDYKGVGISVLEMSHRSSDFAKIINNTENLVRELLAVPDNYKVIFLQGGGCGQFSAVPLNLIGLKAGRCADYVVTGAWSAKAAEEAKKFGTINIVHPKLGSYTKIPDPSTWNLNPDASYVYYCANETVHGVEFDFIPDVKGAVLVCDMSSNFLSKPVDVSKFGVIFAGAQKNVGSAGVTVVIVRDDLLGFALRECPSVLEYKVQAGNSSLYNTPPCFSIYVMGLVLEWIKNNGGAAAMEKLSSIKSQTIYEIIDNSQGFYVCPVEPQNRSKMNIPFRIGNAKGDDALEKRFLDKALELNMLSLKGHRSVGGVRASLYNAVTIEDVQKLAAFMKKFLEMHQL

SEQ ID NO: 1419 - protein, 370 aa, synthetic construct
MDAPRQVVNFGPGPAKLPHSVLLEIQKELLDYKGVGISVLEMSHRSSDFAKIINNTENLVRELLAVPDNYKVIFLQGGGCGQFSAVPLNLIGLKAGRCADYVVTGAWSAKAAEEAKKFGTINIVHPKLGSYTKIPDPSTWNLNPDASYVYYCANETVHGVEFDFIPDVKGAVLVCDMSSNFLSKPVDVSKFGVIFAGAQKNVASAGVTVVIVRDDLLGFALRECPSVLEYKVQAGNSSLYNTPPCFSIYVMGLVLEWIKNNGGAAAMEKLSSIKSQTIYEIIDNSQGFYVCPVEPQNRSKMNIPFRIGNAKGDDALEKRFLDKALELNMLSLKGHRSVGGIRASLYNAVTIEDVQKLAAFMKKFLEMHQL

SEQ ID NO: 1420 - protein, 370 aa, synthetic construct
MDAPRQVVNFGPGPAKLPHSVLLEIQKELLDYKGVGISVLEMSHRSSDFAKIINNTENLVRELLAVPDNYKLIFLQGGGCGQFSAVPLNLIGLKAGRCADYVVTGAWSAKAAEEAKKFGTINIVHPKLGSYTKIPDPSTWNLNPDASYVYYCANETVHGVEFDFIPDVKGAVLVCDMSSNFLSKPVDVSKFGVIFAGAQKNVGSAGVTVVIVRDDLLGFALRECPSVLEYKVQAGNSSLYNTPPCFSIYVMGLVLEWIKNNGGAAAMEKLSSIKSQTIYEIIDNSQGFYVCPVEPQNRSKMNIPFRIGNAKGDDALEKRFLDKALELNMLSLKGHRSVGGIRASLYNAVTIEDVQKLAAFMKKFLEMHQL

SEQ ID NO: 1421 - protein, 370 aa, synthetic construct
MDAPRQVVNFGPGPAKLPHSVLLEIQKELLDYKGVGISVLEMSHRSSDFAKIINNTENLVRELLAVPDNYKVIFLQGGGCGQFSAVPLNLIGLKAGRCADYVVTGAWSAKAAEEAKKFGTINIVHPKLGSYTKIPDPSTWNLNPDASYVYYCANETVHGVEFDFIPDVKGAVLVCDMSSNFLSKPVDVSKFGVIFAGAQKNVGSAGVTVVIVRDDLLGIALRECPSVLEYKVQAGNSSLYNTPPCFSIYVMGLVLEWIKNNGGAAAMEKLSSIKSQTIYEIIDNSQGFYVCPVEPQNRSKMNIPFRIGNAKGDDALEKRFLDKALELNMLSLKGHRSVGGIRASLYNAVTIEDVQKLAAFMKKFLEMHQL

SEQ ID NO: 1422 - protein, 370 aa, synthetic construct
MDAPRQVVNFGPGPAKLPHSVLLEIQKELLDYKGVGISVLEMSHRSSDFAKIINNTENLVRELLAVPDNYKVIFLQGGGCGQFSAVPLNLIGLKAGRCADYVVTGAWSAKAAEEAKKFGTINIVHPKLGSYTKIPDPSTWNLNPDASYVYYCANETVHGVEFDFIPDVKGAVLVCDMSSNFLSKPVDVSKFGVIFAGAQKNVGSAGVTVVIVRDDLLGFALRECPSVLEYKVQAGNSSLYNTPPCFSIYVMGLVLEWIKNNGGAAAMEKLSSIKSQTIYEIIDNSQGFYVCPVEPQNRSKMNIPFRIGNAKGDDALEKRFLDKALELNMLSLKGHRSVGGIRASLYNAVTIEDLQKLAAFMKKFLEMHQL

SEQ ID NO: 1423 - protein, 370 aa, synthetic construct
MDAPRQVVNFGPGPAKLPHSVLLEIQKELLDYKGVGISVLEMSHRSSDFAKIINNTENLVRELLAVPDNYKVIFLQGGGCGQFSAVPLNLIGLKAGRCADYVVTGAWSAKAAEEAKKFGTINIVHPKLGSYTKIPDPSTWNLNPDASYVYYCANETVHGVEFDFIPDVKGAVLVCDMSSNFLSKPVDVSKFGVIFAGAQKNVGSAGVTVVIVRDDLLGFALRECPSVLEYKVQAGNSSLYNTPPCFSIYAMGLVLEWIKNNGGAAAMEKLSSIKSQTIYEIIDNSQGFYVCPVEPQNRSKMNIPFRIGNAKGDDALEKRFLDKALELNMLSLKGHRSVGGIRASLYNAVTIEDVQKLAAFMKKFLEMHQL

SEQ ID NO: 1424 - protein, 370 aa, synthetic construct
MDAPRQVVNFGPGPAKLPHSVLLEIQKELLDYKGVGMSVLEMSHRSSDFAKIINNTENLVRELLAVPDNYKVIFLQGGGCGQFSAVPLNLIGLKAGRCADYVVTGAWSAKAAEEAKKFGTINIVHPKLGSYTKIPDPSTWNLNPDASYVYYCANETVHGVEFDFIPDVKGAVLVCDMSSNFLSKPVDVSKFGVIFAGAQKNVGSAGVTVVIVRDDLLGFALRECPSVLEYKVQAGNSSLYNTPPCFSIYVMGLVLEWIKNNGGAAAMEKLSSIKSQTIYEIIDNSQGFYVCPVEPQNRSKMNIPFRIGNAKGDDALEKRFLDKALELNMLSLKGHRSVGGIRASLYNAVTIEDVQKLAAFMKKFLEMHQL

SEQ ID NO: 1425 - protein, 370 aa, synthetic construct
MDAPRQVVNFGPGPAKLPHSVLLEIQKELLDYKGVGISVLEMSHRSSDFAKIINNTENLVRELLAVPDNYKVIFLQGGGCGQFSAVPLNLIGLKAGRCADYVVTGAWSAKAAEEAKKFGTINIVHPKLGSYTKIPDPSTWNLNPDASYVYYCANETVHGVEFDFIPDVKGAVLVCDMSSNFLSKPVDVSKFGVIFAGAQKNVGSAGVTVVIVRDDLLGFALRECPSVLEYKVQAGNSSLYNTPPCFSIYVMGLVLEWIKNNGGAAAMEKLSSIKSQTIYEIIDNSQGFYVCPVEPQNRSKMNIPFRIGNAKGDDALEKRFLDKALELNMLSLKGHRSVGGIRASLYNAVTIEDVQKLAVFMKKFLEMHQL

SEQ ID NO: 1426 - protein, 370 aa, synthetic construct
MDAPRQVVNFGPGPAKLPHSVLLEIQKELLDYKGVGISVLEMSHRSSDFAKIINNTENLVRELLAVPDNYKVIFLQGGGCGQFSAVPLNLIGLRAGRCADYVVTGAWSAKAAEEAKKFGTINIVHPKLGSYTKIPDPSTWNLNPDASYVYYCANETVHGVEFDFIPDVKGAVLVCDMSSNFLSKPVDVSKFGVIFAGAQKNVGSAGVTVVIVRDDLLGFALRECPSVLEYKVQAGNSSLYNTPPCFSIYVMGLVLEWIKNNGGAAAMEKLSSIKSQTIYEIIDNSQGFYVCPVEPQNRSKMNIPFRIGNAKGDDALEKRFLDKALELNMLSLKGHRSVGGIRASLYNAVTIEDVQKLAAFMKKFLEMHQL

SEQ ID NO: 1427 - protein, 370 aa, synthetic construct
MDAPRQVVNFGPGPAKLPHSVLLEIQKELLDYKGVGISVLEMSHRSSDFAKIINNTENLVRELLAVPDNYKVIFLQGGGCGQFSAVPLNLIGFKAGRCADYVVTGAWSAKAAEEAKKFGTINIVHPKLGSYTKIPDPSTWNLNPDASYVYYCANETVHGVEFDFIPDVKGAVLVCDMSSNFLSKPVDVSKFGVIFAGAQKNVGSAGVTVVIVRDDLLGFALRECPSVLEYKVQAGNSSLYNTPPCFSIYVMGLVLEWIKNNGGAAAMEKLSSIKSQTIYEIIDNSQGFYVCPVEPQNRSKMNIPFRIGNAKGDDALEKRFLDKALELNMLSLKGHRSVGGIRASLYNAVTIEDVQKLAAFMKKFLEMHQL

SEQ ID NO: 1428 - protein, 370 aa, synthetic construct
MDAPRQVVNFGPGPAKLPHSVLLEIQKELLDYKGVGISVLEMSHRSSDFAKIINNTENLVRELLAVPDNYKVFFLQGGGCGQFSAVPLNLIGLKAGRCADYVVTGAWSAKAAEEAKKFGTINIVHPKLGSYTKIPDPSTWNLNPDASYVYYCANETVHGVEFDFIPDVKGAVLVCDMSSNFLSKPVDVSKFGVIFAGAQKNVGSAGVTVVIVRDDLLGFALRECPSVLEYKVQAGNSSLYNTPPCFSIYVMGLVLEWIKNNGGAAAMEKLSSIKSQTIYEIIDNSQGFYVCPVEPQNRSKMNIPFRIGNAKGDDALEKRFLDKALELNMLSLKGHRSVGGIRASLYNAVTIEDVQKLAAFMKKFLEMHQL

SEQ ID NO: 1429 - protein, 370 aa, synthetic construct
MDAPRQVVNFGPGPAKLPHSVLLEIQKELLDYKGVGISVLEMSHRSSDFAKIINNTENLVRELLAVPDNYKVIFLQGGGCGQFSAVPLNLIGLKAGRCADYVVTGAWSAKAAEEAKKFGTINIVHPKLGSYTKIPDPSTWNLNPDASYVYYCANETVHGVEFDFIPDVKGAVLVCDMSSNFLSKPVDVSKFGLIFAGAQKNVGSAGVTVVIVRDDLLGFALRECPSVLEYKVQAGNSSLYNTPPCFSIYVMGLVLEWIKNNGGAAAMEKLSSIKSQTIYEIIDNSQGFYVCPVEPQNRSKMNIPFRIGNAKGDDALEKRFLDKALELNMLSLKGHRSVGGIRASLYNAVTIEDVQKLAAFMKKFLEMHQL

SEQ ID NO: 1430 - protein, 370 aa, synthetic construct
MDAPRQVVNFGPGPAKLPHSVLLEIQKELLDYKGVGISVLEMSHRSSDFAKIINNTENLVRELLAVPDNYKVIFLQGGGCGQFSAVPLNLIGLKAGRCADYVVTGAWSAKAAEEAKKFGTINIVHPKLGSYTKIPDPSTWNLNPDASYVYYCANETVHGVEFDFIPDVKGAVLVCDMSSNFLSKPVDVSKFGVIFAGAQKNVGSAGVTVVIVRDDLLGFALRECPSVLEYKVQAGNSSLYNTPPCFSIYVMGLVLEWIKNNGGAAAMEKLSSIKSQTIYEIIDNSQGFYVCPVEPQNRSKMNIPFRIGNAKGDDALEKRFLDKALELNMLSLKGHRSVGGIRASLYNAGTIEDVQKLAAFMKKFLEMHQL

SEQ ID NO: 1431 - protein, 370 aa, synthetic construct
MDAPRQVVNFGPGPAKLPHSVLLEIQKELLDYKGVGISVLEMSHRSSDFAKIINNTENLVRELLAVPDNYKVIFLQGGGCGQFSAVPLNLIGLKAGRCADYVVTGAWSAKAAEEAKKFGTINIVHPKLGSYTKIPDPGTWNLNPDASYVYYCANETVHGVEFDFIPDVKGAVLVCDMSSNFLSKPVDVSKFGVIFAGAQKNVGSAGVTVVIVRDDLLGFALRECPSVLEYKVQAGNSSLYNTPPCFSIYVMGLVLEWIKNNGGAAAMEKLSSIKSQTIYEIIDNSQGFYVCPVEPQNRSKMNIPFRIGNAKGDDALEKRFLDKALELNMLSLKGHRSVGGIRASLYNAVTIEDVQKLAAFMKKFLEMHQL

SEQ ID NO: 1432 - protein, 370 aa, synthetic construct
MDAPRQVVNFGPGPAKLPHSVLLEIQKELLDYKGVGISVLEMSHRSSDFAKIINNTENLVRELLAVPDNYKVICLQGGGCGQFSAVPLNLIGLKAGRCADYVVTGAWSAKAAEEAKKFGTINIVHPKLGSYTKIPDPSTWNLNPDASYVYYCANETVHGVEFDFIPDVKGAVLVCDMSSNFLSKPVDVSKFGVIFAGAQKNVGSAGVTVVIVRDDLLGFALRECPSVLEYKVQAGNSSLYNTPPCFSIYVMGLVLEWIKNNGGAAAMEKLSSIKSQTIYEIIDNSQGFYVCPVEPQNRSKMNIPFRIGNAKGDDALEKRFLDKALELNMLSLKGHRSVGGIRASLYNAVTIEDVQKLAAFMKKFLEMHQL

SEQ ID NO: 1433 - protein, 370 aa, synthetic construct
MDAPRQVVNFGPGPAKLPHSVLLEIQKELLDYKGVGISVLEMSHRSSDFAKIINNTENLVRELLAVPDNYKVIFLQGGGCGQFSAVPLNLIGLKAGRCADYVVTGAWSAKAAEEAKKFGTINIVHPKLGSYTKIPDPSTWNLNPDASYVYYCANETVHGVEFDFIPDVKGAVLVCDMSSNFLSKPVDVSKFGVIFAGAQKNVGSAGVTVVIVRDDLLGFALRECPSVLEYKVQAGNSSLYNTPPCFSIYVMGLVLEWIKNNGGAAAMEKLSSIKSQTIYEIIDNSQGFYVCPVEPQNRSKMNIPFRIGNAKGDDALEKRFLDKALELNMLSLKGHRSVGGIRACLYNAVTIEDVQKLAAFMKKFLEMHQL

SEQ ID NO: 1434 - protein, 370 aa, synthetic construct
MDAPRQVVNFGPGPAKLPHSVLLEIQKELLDYKGVGISVLEMSHRSSDFAKIINNTENLVRELLAVPDNYKVIFLQGGGCGQFSAVPLNLIGLQAGRCADYVVTGAWSAKAAEEAKKFGTINIVHPKLGSYTKIPDPSTWNLNPDASYVYYCANETVHGVEFDFIPDVKGAVLVCDMSSNFLSKPVDVSKFGVIFAGAQKNVGSAGVTVVIVRDDLLGFALRECPSVLEYKVQAGNSSLYNTPPCFSIYVMGLVLEWIKNNGGAAAMEKLSSIKSQTIYEIIDNSQGFYVCPVEPQNRSKMNIPFRIGNAKGDDALEKRFLDKALELNMLSLKGHRSVGGIRASLYNAVTIEDVQKLAAFMKKFLEMHQL

SEQ ID NO: 1435 - protein, 370 aa, synthetic construct
MDAPRQVVNFGPGPAKLPHSVLLEIQKELLDYKGVGISVLEMSHRSSDFAKIINNTENLVRELLAVPDNYKVIFLQGGGCGQFSAVPLNLIGLKAGRCADYVVTGAWSAKAAEEAKKFGTINIVHPKLGSYTKIPDPSTWNLNPDASYVYYCANETVHGVEFDFIPDVKGAVLVCDMSSNFLSKPVDVSKFGVIFAGAQKNVGSAGVTVVIVRDDLLGFALRECPSVLEYKVQAGNSSLYNTPPCFSIYVMGLVLEWIKNNGGAAAMEKLSSIKSQTIYEIIDNSQGFYVCPVEPQNRSKMNIPFRIGNAKGDDALEQRFLDKALELNMLSLKGHRSVGGIRASLYNAVTIEDVQKLAAFMKKFLEMHQL

SEQ ID NO: 1436 - protein, 370 aa, synthetic construct
MDAPRQVVNFGPGPAKLPHSVLLEIQKELLDYKGVGISVLEMSHRSSDFAKIINNTENLVRELLAVPDNYKVIFLQGGGCGQFSAVPLNLIGLTAGRCADYVVTGAWSAKAAEEAKKFGTINIVHPKLGSYTKIPDPSTWNLNPDASYVYYCANETVHGVEFDFIPDVKGAVLVCDMSSNFLSKPVDVSKFGVIFAGAQKNVGSAGVTVVIVRDDLLGFALRECPSVLEYKVQAGNSSLYNTPPCFSIYVMGLVLEWIKNNGGAAAMEKLSSIKSQTIYEIIDNSQGFYVCPVEPQNRSKMNIPFRIGNAKGDDALEKRFLDKALELNMLSLKGHRSVGGIRASLYNAVTIEDVQKLAAFMKKFLEMHQL

SEQ ID NO: 1437 - protein, 370 aa, synthetic construct
MDAPRQVVNFGPGPAKLPHSVLLEIQKELLDYKGVGISVLEMSHRSSDFAKIINNTENLVRELLAVPDNYKVIFLQGGGCGQFSAVPLNLIGLKAGRCADYVVTGAWSAKAAEEAKKFGTINIVHPKLGSYTKIPDPSTWNLNPDASYVYYCANETVHGVEFDFIPDVKGAVLVCDMSSNFLSKPVDVSKFGVIFAGAQKNVGSAGVTVVIVRDDLLGFALRECPSVLEYKVQAGNSSLYNTAPCFSIYVMGLVLEWIKNNGGAAAMEKLSSIKSQTIYEIIDNSQGFYVCPVEPQNRSKMNIPFRIGNAKGDDALEKRFLDKALELNMLSLKGHRSVGGIRASLYNAVTIEDVQKLAAFMKKFLEMHQL

SEQ ID NO: 1438 - protein, 370 aa, synthetic construct
MDAPRQVVNFGPGPAKLPHSVLLEIQKELLDYKGVGISVLEMSHRSSDFAKIINNTENLVRELLAVPDNYKVIFLQGGGCGQFSAVPLNLIGLKAGRCADYVVTGAWSAKAAEEAKKFGTINIVHPKLGSYTKIPDPSTWNLNPDASYVYYCANETVHGVEFDFIPDVKGAVLVCDMSSNFLSKPVDVSKFGVIFAGAQKNVGSAGVTVVIVRDDLLGFALRECPSVLEYKVQAGNSSMYNTPPCFSIYVMGLVLEWIKNNGGAAAMEKLSSIKSQTIYEIIDNSQGFYVCPVEPQNRSKMNIPFRIGNAKGDDALEKRFLDKALELNMLSLKGHRSVGGIRASLYNAVTIEDVQKLAAFMKKFLEMHQL

SEQ ID NO: 1439 - protein, 370 aa, synthetic construct
MDAPRQVVNFGPGPAKLPHSVLLEIQKELLDYKGVGISVLEMSHRSSDFAKIINNTENLVRELLAVPDNYKVIFLQGGGCGQFSAVPLNLIGLKAGRCADYVVTGAWSAKAAEEAKKFGTINIVHPKLGSYTKIPDPSTWNLNPDASYVYYCANETVHGVEFDFIPDVKGAVLVCDMSSNFLSKPVDVSKFGVIFAGAQKNVGSAGVTVVIVRDDLLGFALRECPSVLEYKVQAGNSSLYNTPPCFSIYVMGLVLEWITNNGGAAAMEKLSSIKSQTIYEIIDNSQGFYVCPVEPQNRSKMNIPFRIGNAKGDDALEKRFLDKALELNMLSLKGHRSVGGIRASLYNAVTIEDVQKLAAFMKKFLEMHQL

SEQ ID NO: 1440 - protein, 370 aa, synthetic construct
MDAPRQVVNFGPGPAKLPHSVLLEIQKELLDYKGVGISVLEISHRSSDFAKIINNTENLVRELLAVPDNYKVIFLQGGGCGQFSAVPLNLIGLKAGRCADYVVTGAWSAKAAEEAKKFGTINIVHPKLGSYTKIPDPSTWNLNPDASYVYYCANETVHGVEFDFIPDVKGAVLVCDMSSNFLSKPVDVSKFGVIFAGAQKNVGSAGVTVVIVRDDLLGFALRECPSVLEYKVQAGNSSLYNTPPCFSIYVMGLVLEWIKNNGGAAAMEKLSSIKSQTIYEIIDNSQGFYVCPVEPQNRSKMNIPFRIGNAKGDDALEKRFLDKALELNMLSLKGHRSVGGIRASLYNAVTIEDVQKLAAFMKKFLEMHQL

SEQ ID NO: 1441 - protein, 370 aa, synthetic construct
MDAPRQVVNFGPGPAKLPHSVLLEIQKELLDYKGVGISVLEMSHRSSDFAKIINNTENLVRELLAVPDNYKVIFLQGGGCGQFSAVPLNLIGLKAGRCADYVVTGAWSAKAAEEAKKFGTINIVHPKLGSYTKIPDPSTWNLNPDASYVYYCANETVHGVEFDFIPDVKGAVLVCDMSSNFLSKPVDVSKFGVIFAGAQKNVGSAGVTVVIVRDDLLGFAIRECPSVLEYKVQAGNSSLYNTPPCFSIYVMGLVLEWIKNNGGAAAMEKLSSIKSQTIYEIIDNSQGFYVCPVEPQNRSKMNIPFRIGNAKGDDALEKRFLDKALELNMLSLKGHRSVGGIRASLYNAVTIEDVQKLAAFMKKFLEMHQL

SEQ ID NO: 1442 - protein, 370 aa, synthetic construct
MDAPRQVVNFGPGPAKLPHSVLLEIQKELLDYKGVGISVLEMSHRSSDFAKIINNTENLVRELLAVPDNYKVIFLQGGGCGQFSAVPLNLIGLKAGRCADYVVTGAWSAKAAEEAKKFGTINIVHPKLGSYTKIPDPSTWNLNPDASYVYYCANETVHGVEFDFIPDVKGAVLVCDMSSNFLSKPVDVSKFGVIFAGAQKNVGSAGVTVVIVRDDLLGFALRECPSVLEYKVQAGNSSLYNTPPCFSIYVMGLVLEWIKNNGGAAAMEKLSSIKSQTIYEIIDNSQGFYVCPVEPQNRSKMNIPFRIGNAKGDDALEKRFLDKALELNMLSLKGHRSVGGIRASLYNAVTIEDVQQLAAFMKKFLEMHQL

SEQ ID NO: 1443 - protein, 370 aa, synthetic construct
MDAPRQVFNFGPGPAKLPHSVLLEIQKELLDYKGVGISVLEMSHRSSDFAKIINNTENLVRELLAVPDNYKVIFLQGGGCGQFSAVPLNLIGLKAGRCADYVVTGAWSAKAAEEAKKFGTINIVHPKLGSYTKIPDPSTWNLNPDASYVYYCANETVHGVEFDFIPDVKGAVLVCDMSSNFLSKPVDVSKFGVIFAGAQKNVGSAGVTVVIVRDDLLGFALRECPSVLEYKVQAGNSSLYNTPPCFSIYVMGLVLEWIKNNGGAAAMEKLSSIKSQTIYEIIDNSQGFYVCPVEPQNRSKMNIPFRIGNAKGDDALEKRFLDKALELNMLSLKGHRSVGGIRASLYNAVTIEDVQKLAAFMKKFLEMHQL

SEQ ID NO: 1444 - protein, 370 aa, synthetic construct
MDAPRQEVNFGPGPAKLPHSVLLEIQKELLDYKGVGISVLEMSHRSSDFAKIINNTENLVRELLAVPDNYKVIFLQGGGCGQFSAVPLNLIGLKAGRCADYVVTGAWSAKAAEEAKKFGTINIVHPKLGSYTKIPDPSTWNLNPDASYVYYCANETVHGVEFDFIPDVKGAVLVCDMSSNFLSKPVDVSKFGVIFAGAQKNVGSAGVTVVIVRDDLLGFALRECPSVLEYKVQAGNSSLYNTPPCFSIYVMGLVLEWIKNNGGAAAMEKLSSIKSQTIYEIIDNSQGFYVCPVEPQNRSKMNIPFRIGNAKGDDALEKRFLDKALELNMLSLKGHRSVGGIRASLYNAVTIEDVQKLAAFMKKFLEMHQL

SEQ ID NO: 1445 - protein, 370 aa, synthetic construct
MDAPRQVVNFGPGPAKLPHSVLLEIQKELLDYKGVGISVLEMSHRSSDFAKIINNTENLVRELLAVPDNYKVIFLQGGGCGQFSAVPLNLIGLKAGRCADYVVTGAWSAKAAEEAKKFGTINIVHPKLGSYTKIPDPSTWNLNPDASYVYYCANETVHGVEFDFIPDVKGAVLVCDMSSNFLSKPVDVSKFGVIFAGAQKNVGSAGVTVVIVRDDLLGFALRECPSVLEYKVQAGNSSLYNTPPCFSIYVMGLVLEWIKNNGGAAAMEKLSSIKSQTIYEIIDNSQGFYVCPVEPQNRSKMNIPFRIGNAKGDDALEKRFLDKALELNMLSLKGHRSVGGIRASLYNAVTMEDVQKLAAFMKKFLEMHQL

SEQ ID NO: 1446 - protein, 370 aa, synthetic construct
MDAPRQVVNFGPGPAKLPHSVLLEIQKELLDYKGVGISVLEMSHRSSDFAKIINNTENLVRELLAVPDNYKVIFLQGGGCGQFSAVPLNLIGLKAGRCADYVVTGAWSAKAAEEAKKFGTINIVHPKLGSYTKIPDPSTWNLNPDASYVYYCANETVHGVEFDFIPDVKGAVLVCDMSSNFLSKPVDVSKFGVIFAGAQKNVGSAGVTVVIVRDDLLGFALRECPSVLEYKVQAGNSSLYNTPPCFSIYVMGLVMEWIKNNGGAAAMEKLSSIKSQTIYEIIDNSQGFYVCPVEPQNRSKMNIPFRIGNAKGDDALEKRFLDKALELNMLSLKGHRSVGGIRASLYNAVTIEDVQKLAAFMKKFLEMHQL

SEQ ID NO: 1447 - protein, 370 aa, synthetic construct
MDAPRQVVNFGPGPAKLPHSVLLEIQKELLDYKGVGISVLEMSHRSSDFAKIINNTENLVRELLAVPDNYKMIFLQGGGCGQFSAVPLNLIGLKAGRCADYVVTGAWSAKAAEEAKKFGTINIVHPKLGSYTKIPDPSTWNLNPDASYVYYCANETVHGVEFDFIPDVKGAVLVCDMSSNFLSKPVDVSKFGVIFAGAQKNVGSAGVTVVIVRDDLLGFALRECPSVLEYKVQAGNSSLYNTPPCFSIYVMGLVLEWIKNNGGAAAMEKLSSIKSQTIYEIIDNSQGFYVCPVEPQNRSKMNIPFRIGNAKGDDALEKRFLDKALELNMLSLKGHRSVGGIRASLYNAVTIEDVQKLAAFMKKFLEMHQL

SEQ ID NO: 1448 - protein, 370 aa, synthetic construct
MDAPRQVVNFGPGPAKLPHSVLLEIQKELLDYKGVGISVLEMSHRSSDFAKIINNTENLVRELLAVPDNYKVIFLQGGGCGQFSAVPLNLIGLKAGRCADYVVTGAWSAKAAEEAKKFGTINIVHPKLGSYTKIPEPSTWNLNPDASYVYYCANETVHGVEFDFIPDVKGAVLVCDMSSNFLSKPVDVSKFGVIFAGAQKNVGSAGVTVVIVRDDLLGFALRECPSVLEYKVQAGNSSLYNTPPCFSIYVMGLVLEWIKNNGGAAAMEKLSSIKSQTIYEIIDNSQGFYVCPVEPQNRSKMNIPFRIGNAKGDDALEKRFLDKALELNMLSLKGHRSVGGIRASLYNAVTIEDVQKLAAFMKKFLEMHQL

SEQ ID NO: 1449 - protein, 370 aa, synthetic construct
MDAPRQVVNFGPGPAKLPHSVLLEIQKELLDYKGVGISVLEMSHRSSDFAKIINNTENLVRELLAVPDNYKVIFLQGGGCGQFSAVPLNLIGLKAGRCADYVVTGAWSAKAAEEAKKFGTINIVHPKLGSYTKIPDPSTWNLNPDASYVYYCANETVHGVEFDFIPDVKGAVLVCDMSSNFLSKPVDVSKFGVIFAGAQKNVGSAGVTVVIVRDDLLGFALRECPSVLEYKVQAGNSSLYNTPPCFSIYVMGLVLEWIKNNGGAAAMEKLSSIKSQTIYEIIDNSQGFYVCPVEPQNRSKMNIPFRIGNAKGDDALEKRFLDKALELNMLSLKGHSSVGGIRASLYNAVTIEDVQKLAAFMKKFLEMHQL

SEQ ID NO: 1450 - protein, 370 aa, synthetic construct
MDAPRQVVNFGPGPAKLPHSVSLEIQKELLDYKGVGISVLEMSHRSSDFAKIINNTENLVRELLAVPDNYKVIFLQGGGCGQFSAVPLNLIGLKAGRCADYVVTGAWSAKAAEEAKKFGTINIVHPKLGSYTKIPDPSTWNLNPDASYVYYCANETVHGVEFDFIPDVKGAVLVCDMSSNFLSKPVDVSKFGVIFAGAQKNVGSAGVTVVIVRDDLLGFALRECPSVLEYKVQAGNSSLYNTPPCFSIYVMGLVLEWIKNNGGAAAMEKLSSIKSQTIYEIIDNSQGFYVCPVEPQNRSKMNIPFRIGNAKGDDALEKRFLDKALELNMLSLKGHRSVGGIRASLYNAVTIEDVQKLAAFMKKFLEMHQL

SEQ ID NO: 1451 - protein, 370 aa, synthetic construct
MDAPRQVVNFGPGPAKLPHSVLLEIQKELLDYKGVGISVLEMSHRSSDFAKIINNTENLVRELLAVPDNYKVIFLQGGGCGQFSAVPLNLIGLKAGRCADYVVTGAWSAKAAEEAKKFGTINIVHPKLGSYTKIPDPSTWNLNPDASYVYYCANETVHGVEFDFIPDVKGAVLVCDMSSNFLSKPVDVSKFGVIFAGAQKNVGSAGVTVVIVRDDLLGFALRECPSVLEYKVQAGDSSLYNTPPCFSIYVMGLVLEWIKNNGGAAAMEKLSSIKSQTIYEIIDNSQGFYVCPVEPQNRSKMNIPFRIGNAKGDDALEKRFLDKALELNMLSLKGHRSVGGIRASLYNAVTIEDVQKLAAFMKKFLEMHQL

SEQ ID NO: 1452 - protein, 370 aa, synthetic construct
MDAPRQVVNFGPGPAKLPHSVLLEIQKELLDYKGVGISVLEMSHRSSDFAKIINNTENLVRELLAVPDNYKVIFLQGGGCGQFSAVPLNLIGLKAGRCADYVVTGAWSAKAAEEAKKFGTINIVHPKLGSYTKIPDPSTWNLNPDASYVYYCANETVHGVEFDFIPDVQGAVLVCDMSSNFLSKPVDVSKFGVIFAGAQKNVGSAGVTVVIVRDDLLGFALRECPSVLEYKVQAGNSSLYNTPPCFSIYVMGLVLEWIKNNGGAAAMEKLSSIKSQTIYEIIDNSQGFYVCPVEPQNRSKMNIPFRIGNAKGDDALEKRFLDKALELNMLSLKGHRSVGGIRASLYNAVTIEDVQKLAAFMKKFLEMHQL

SEQ ID NO: 1453 - protein, 370 aa, synthetic construct
MDAPRQVVNFGPGPAKLPHSVLLEIQKELLDYKGVGISVLEMSHRSSDFAKIINNTENLVRELLAVPDNYKVIFLQGGGCGQFSAVPLNLIGLKAGRCADYVVTGAWSAKAAEEAKKFGTINIVHPKLGSYTKIPDPSTWNLNPDTSYVYYCANETVHGVEFDFIPDVKGAVLVCDMSSNFLSKPVDVSKFGVIFAGAQKNVGSAGVTVVIVRDDLLGFALRECPSVLEYKVQAGNSSLYNTPPCFSIYVMGLVLEWIKNNGGAAAMEKLSSIKSQTIYEIIDNSQGFYVCPVEPQNRSKMNIPFRIGNAKGDDALEKRFLDKALELNMLSLKGHRSVGGIRASLYNAVTIEDVQKLAAFMKKFLEMHQL

SEQ ID NO: 1454 - protein, 370 aa, synthetic construct
MDAPRQVVNFGPGPTKLPHSVLLEIQKELLDYKGVGISVLEMSHRSSDFAKIINNTENLVRELLAVPDNYKVIFLQGGGCGQFSAVPLNLIGLKAGRCADYVVTGAWSAKAAEEAKKFGTINIVHPKLGSYTKIPDPSTWNLNPDASYVYYCANETVHGVEFDFIPDVKGAVLVCDMSSNFLSKPVDVSKFGVIFAGAQKNVGSAGVTVVIVRDDLLGFALRECPSVLEYKVQAGNSSLYNTPPCFSIYVMGLVLEWIKNNGGAAAMEKLSSIKSQTIYEIIDNSQGFYVCPVEPQNRSKMNIPFRIGNAKGDDALEKRFLDKALELNMLSLKGHRSVGGIRASLYNAVTIEDVQKLAAFMKKFLEMHQL

SEQ ID NO: 1455 - protein, 370 aa, synthetic construct
MDAPRQVVNFGPGPAKLPHSVLLEIQKELLDYKGVGISVLEMSHRSSDFAKIINNTENLVRELLAVPDNYKVIFLQGGGCGQFSAVPLNLIGLKAGRCADYVVTGAWSAKAAEEAKKFGTINIVHPKLGSYTKIPDPSTWNLNPDASYVYYCANETVHGVEFDFIPDVKGAVLVCDMSSNFLSKPVDVSKFGVIFAGAQKNVGSAGVTVVIVRDDLLGFALRECPSVLEYKVQAGNSSLYNTPPCFSIYVMGLVLEWIKNNGGAAAMEKLSSIKSQTIYEIIDNSQGFYVCPVEPQNRSKMNIPFRIGNAKGDDALEKRFLDKAVELNMLSLKGHRSVGGIRASLYNAVTIEDVQKLAAFMKKFLEMHQL

SEQ ID NO: 1456 - protein, 370 aa, synthetic construct
MDAPRQVVNFGPGPAKLPHSVLLEIQKELLDYKGVGTSVLEMSHRSSDFAKIINNTENLVRELLAVPDNYKVIFLQGGGCGQFSAVPLNLIGLKAGRCADYVVTGAWSAKAAEEAKKFGTINIVHPKLGSYTKIPDPSTWNLNPDASYVYYCANETVHGVEFDFIPDVKGAVLVCDMSSNFLSKPVDVSKFGVIFAGAQKNVGSAGVTVVIVRDDLLGFALRECPSVLEYKVQAGNSSLYNTPPCFSIYVMGLVLEWIKNNGGAAAMEKLSSIKSQTIYEIIDNSQGFYVCPVEPQNRSKMNIPFRIGNAKGDDALEKRFLDKALELNMLSLKGHRSVGGIRASLYNAVTIEDVQKLAAFMKKFLEMHQL

SEQ ID NO: 1457 - protein, 370 aa, synthetic construct
MDAPRQVVNFGPGPAKLPHSVLLEIQKELLDYKGVGISVLEMSHRSSDFAKIINNTENLVRELLAVPDNYKVIFLQGGGCGQFSAVPLNLIGLKAGRCADYVVTGAWSAKAAEEAKKFGTINIVHPKLGSYTKIPDPSTWNLNPDASYVYYCANETVHGVEFDFIPDVKGAVLVCDMSSNFLSKPVDVSKFGVIFAGAQKNVGSAGVTVVIVRDDLLGFALRECPSVLEYKVQAGNSSLNNTPPCFSIYVMGLVLEWIKNNGGAAAMEKLSSIKSQTIYEIIDNSQGFYVCPVEPQNRSKMNIPFRIGNAKGDDALEKRFLDKALELNMLSLKGHRSVGGIRASLYNAVTIEDVQKLAAFMKKFLEMHQL

SEQ ID NO: 1458 - protein, 370 aa, synthetic construct
MDAPRQVVNFGPGPAKLPHSVLLEIQKELLDYKGVGISVLEMSHRSSDFAKIINNTENLVRELLAVPDNYKVMFLQGGGCGQFSAVPLNLIGLKAGRCADYVVTGAWSAKAAEEAKKFGTINIVHPKLGSYTKIPDPSTWNLNPDASYVYYCANETVHGVEFDFIPDVKGAVLVCDMSSNFLSKPVDVSKFGVIFAGAQKNVGSAGVTVVIVRDDLLGFALRECPSVLEYKVQAGNSSLYNTPPCFSIYVMGLVLEWIKNNGGAAAMEKLSSIKSQTIYEIIDNSQGFYVCPVEPQNRSKMNIPFRIGNAKGDDALEKRFLDKALELNMLSLKGHRSVGGIRASLYNAVTIEDVQKLAAFMKKFLEMHQL

SEQ ID NO: 1459 - protein, 370 aa, synthetic construct
MDAPRQVVNFGPGPAKLPHSVLLEIQKEVLDYKGVGISVLEMSHRSSDFAKIINNTENLVRELLAVPDNYKVIFLQGGGCGQFSAVPLNLIGLKAGRCADYVVTGAWSAKAAEEAKKFGTINIVHPKLGSYTKIPDPSTWNLNPDASYVYYCANETVHGVEFDFIPDVKGAVLVCDMSSNFLSKPVDVSKFGVIFAGAQKNVGSAGVTVVIVRDDLLGFALRECPSVLEYKVQAGNSSLYNTPPCFSIYVMGLVLEWIKNNGGAAAMEKLSSIKSQTIYEIIDNSQGFYVCPVEPQNRSKMNIPFRIGNAKGDDALEKRFLDKALELNMLSLKGHRSVGGIRASLYNAVTIEDVQKLAAFMKKFLEMHQL

SEQ ID NO: 1460 - protein, 370 aa, synthetic construct
MDAPRQVVNFGPGPAKLPHSVLLEIQKELLDYKGVGISVLEMSHRSSDFAKIINNTENLVRELLAVPDNYKVIFLQGGGCGQFSAVPLNLIGLKAGRCADYVVTGAWSAKAAEEAKKFGTINIVHPKLGSYTKIPDPSTWNLNPDASYVYYCANETVHGVEFDFIPDVKGAVLVCDMSSNFLSKPVDVSKFGVIFAGAQKNVGSAGVTVVIVRDDLLGFALRECPSVLEYNVQAGNSSLYNTPPCFSIYVMGLVLEWIKNNGGAAAMEKLSSIKSQTIYEIIDNSQGFYVCPVEPQNRSKMNIPFRIGNAKGDDALEKRFLDKALELNMLSLKGHRSVGGIRASLYNAVTIEDVQKLAAFMKKFLEMHQL

SEQ ID NO: 1461 - protein, 370 aa, synthetic construct
MDAPRQVVNFGPGPAKLPHSVLLEIQKELLDYKGVGISVLEMSHRSSDFAKIINNTENLVREMLAVPDNYKVIFLQGGGCGQFSAVPLNLIGLKAGRCADYVVTGAWSAKAAEEAKKFGTINIVHPKLGSYTKIPDPSTWNLNPDASYVYYCANETVHGVEFDFIPDVKGAVLVCDMSSNFLSKPVDVSKFGVIFAGAQKNVGSAGVTVVIVRDDLLGFALRECPSVLEYKVQAGNSSLYNTPPCFSIYVMGLVLEWIKNNGGAAAMEKLSSIKSQTIYEIIDNSQGFYVCPVEPQNRSKMNIPFRIGNAKGDDALEKRFLDKALELNMLSLKGHRSVGGIRASLYNAVTIEDVQKLAAFMKKFLEMHQL

SEQ ID NO: 1462 - protein, 370 aa, synthetic construct
MDAPRQVVNFGPGPAKLPHSVLLEIQKELLDYKGVGISVLEMSHRSSDFAKIINNTENLVRELLAVPDNYKVIFLQGGGCGQFSAVPLNLIGLKAGRCADYVVTGAWSAKAAEEAKKFGTINIVHPKLGSYTKIPDPSTWNLNPDASYVYYCANETVHGVEFDFIPDVKGAVLVCDMSSNFLSKPVDVSKFGVIFAGAQKNVGSAGVTVVIVRDDLLGFALRECPSVLEYKVQAGNSSLYNTPPCFSIYVMGLVLEWIKNNGGAAAMEKLSSIKSQTIYEIIDNSQGFYVCPVEPQNRSRMNIPFRIGNAKGDDALEKRFLDKALELNMLSLKGHRSVGGIRASLYNAVTIEDVQKLAAFMKKFLEMHQL

SEQ ID NO: 1463 - protein, 370 aa, synthetic construct
MDAPRQVVNFGPGPAKLPHSVLLEIQKELLDYKGVGISVLEMSHRSSDFAKIINNTENLVRELLAVPDNYKVIFLQGGGCGQFSAVPLNLIGLKAGRCADYVVTGAWSAKAAEEAKKFGTINIVHPKLGSYTKIPDPSTWNLNPDASYVYYCANETVHGVEFDFIPDVKGAVLVCDMSSNFLSKPVDVSKFGVIFAGAQKNVGSAGVTVVIVRDDLLGFALRECPSVLEYKVQAGNSSLYNTPPCFSIYVMGLVLEWIKNNGGAAAMEKLSSIKSQTIYEIIDNSQGFYVCPVEPQNRSKMNIPFRIGNAKGDDALEKRFLDKALELNMLSLKGHRSVGGIRASLYNAVTIEDVQKLAAFMKKFLEMHKL

SEQ ID NO: 1464 - protein, 370 aa, synthetic construct
MYAPRQVVNFGPGPAKLPHSVLLEIQKELLDYKGVGISVLEMSHRSSDFAKIINNTENLVRELLAVPDNYKVIFLQGGGCGQFSAVPLNLIGLKAGRCADYVVTGAWSAKAAEEAKKFGTINIVHPKLGSYTKIPDPSTWNLNPDASYVYYCANETVHGVEFDFIPDVKGAVLVCDMSSNFLSKPVDVSKFGVIFAGAQKNVGSAGVTVVIVRDDLLGFALRECPSVLEYKVQAGNSSLYNTPPCFSIYVMGLVLEWIKNNGGAAAMEKLSSIKSQTIYEIIDNSQGFYVCPVEPQNRSKMNIPFRIGNAKGDDALEKRFLDKALELNMLSLKGHRSVGGIRASLYNAVTIEDVQKLAAFMKKFLEMHQL

SEQ ID NO: 1465 - protein, 370 aa, synthetic construct
MDAPRQVVNFGPGPAKLPHSVLLEIQKELLDYKGVGISVLEMSHRSSDFAKIINNTENLVRELLAVPDNYKVIFLQGGGCGQFSAVPLNLIGLKAGRCADYVVTGAWSAKAAEEAKKFGTINIVHPKLGSYTKIPDPSTWNLNPDASYVYYCANETVHGVEFDFIPDVKGAVLVCDMSSNFLSKPVDVSKFGVIFAGAQKNVGSAGVTVVIVRDDLLGFALRECPSVLEYKVQAGNSSLYNTPPCFSIFVMGLVLEWIKNNGGAAAMEKLSSIKSQTIYEIIDNSQGFYVCPVEPQNRSKMNIPFRIGNAKGDDALEKRFLDKALELNMLSLKGHRSVGGIRASLYNAVTIEDVQKLAAFMKKFLEMHQL

SEQ ID NO: 1466 - protein, 370 aa, synthetic construct
MDAPRQVVNFGPGPAKLPHSVLLEIQKELLDYKGVGISVLEMSHRSSDFAKIINNTENLVRELLAVPDNYKVIFLQGGGCGQFSAVPLNLIGLKAGRCADYVVTGAWSAEAAEEAKKFGTINIVHPKLGSYTKIPDPSTWNLNPDASYVYYCANETVHGVEFDFIPDVKGAVLVCDMSSNFLSKPVDVSKFGVIFAGAQKNVGSAGVTVVIVRDDLLGFALRECPSVLEYKVQAGNSSLYNTPPCFSIYVMGLVLEWIKNNGGAAAMEKLSSIKSQTIYEIIDNSQGFYVCPVEPQNRSKMNIPFRIGNAKGDDALEKRFLDKALELNMLSLKGHRSVGGIRASLYNAVTIEDVQKLAAFMKKFLEMHQL

SEQ ID NO: 1467 - protein, 370 aa, synthetic construct
MDAPRQVVNFGPGPAKLPHSVLLEIQKELLDYKGVGISVLEMSHRSSDFAKIINNTENLVRELLAVPDNYKVIFLQGGGCGQFSAVPLNLIGLKAGRCADYVVTGAWSAKAAEEAKKFGTINIVRPKLGSYTKIPDPSTWNLNPDASYVYYCANETVHGVEFDFIPDVKGAVLVCDMSSNFLSKPVDVSKFGVIFAGAQKNVGSAGVTVVIVRDDLLGFALRECPSVLEYKVQAGNSSLYNTPPCFSIYVMGLVLEWIKNNGGAAAMEKLSSIKSQTIYEIIDNSQGFYVCPVEPQNRSKMNIPFRIGNAKGDDALEKRFLDKALELNMLSLKGHRSVGGIRASLYNAVTIEDVQKLAAFMKKFLEMHQL

SEQ ID NO: 1468 - protein, 370 aa, synthetic construct
MDAPRQVVNFGPGPAKLPHSVLLAIQKELLDYKGVGISVLEMSHRSSDFAKIINNTENLVRELLAVPDNYKVIFLQGGGCGQFSAVPLNLIGLKAGRCADYVVTGAWSAKAAEEAKKFGTINIVHPKLGSYTKIPDPSTWNLNPDASYVYYCANETVHGVEFDFIPDVKGAVLVCDMSSNFLSKPVDVSKFGVIFAGAQKNVGSAGVTVVIVRDDLLGFALRECPSVLEYKVQAGNSSLYNTPPCFSIYVMGLVLEWIKNNGGAAAMEKLSSIKSQTIYEIIDNSQGFYVCPVEPQNRSKMNIPFRIGNAKGDDALEKRFLDKALELNMLSLKGHRSVGGIRASLYNAVTIEDVQKLAAFMKKFLEMHQL

SEQ ID NO: 1469 - protein, 370 aa, synthetic construct
MDAPRQVVNFGPGPAKLPHSVLLEIQKELLDYKGVGISVLEMSHRSSDFAKIINNTENLVRELLAVPDNYKVIFLQGGGCGQFSAVPLNLIGLKAGRCADYVVTGAWSAKAAEEAKKFGTINIVHPKLGSYTKIPDPSTWNLNPDASYVYYCANETVHGVEFDFIPDVKGAVLVCDMSSNFLSKPVDVSKFGVIFAGAQKNVGSAGVTVVIVRDDLLGFALRECPAVLEYKVQAGNSSLYNTPPCFSIYVMGLVLEWIKNNGGAAAMEKLSSIKSQTIYEIIDNSQGFYVCPVEPQNRSKMNIPFRIGNAKGDDALEKRFLDKALELNMLSLKGHRSVGGIRASLYNAVTIEDVQKLAAFMKKFLEMHQL

SEQ ID NO: 1470 - protein, 370 aa, synthetic construct
MDAPRQVVNFGPGPAKLPHSVLLEIQKELLDYKGVGISVLEMSHRSSDFAKIINNTENLVRELLAVPDNYKVIFLQGGGCGQFSAVPLNLIGLKAGRCADYVVTGAWSAKAAEEAKKFGTINIVHPKLGSYTKIPDPSTWNLNPDASYVYYCANETVHGVEFDFIPDVKGAVLVCDMSSNFLSKPVDVSKFGVIFAGAQKNVGSAGVTVVIVRDDLLGFALRECPSVLEYKVQAGNSSLYNTPPGFSIYVMGLVLEWIKNNGGAAAMEKLSSIKSQTIYEIIDNSQGFYVCPVEPQNRSKMNIPFRIGNAKGDDALEKRFLDKALELNMLSLKGHRSVGGIRASLYNAVTIEDVQKLAAFMKKFLEMHQL

SEQ ID NO: 1471 - protein, 370 aa, synthetic construct
MDAPRQVVNFGPGPAKLPHSVLLEIQKELLDYKGVGISVLEMSHRSSDFAKIFNNTENLVRELLAVPDNYKVIFLQGGGCGQFSAVPLNLIGLKAGRCADYVVTGAWSAKAAEEAKKFGTINIVHPKLGSYTKIPDPSTWNLNPDASYVYYCANETVHGVEFDFIPDVKGAVLVCDMSSNFLSKPVDVSKFGVIFAGAQKNVGSAGVTVVIVRDDLLGFALRECPSVLEYKVQAGNSSLYNTPPCFSIYVMGLVLEWIKNNGGAAAMEKLSSIKSQTIYEIIDNSQGFYVCPVEPQNRSKMNIPFRIGNAKGDDALEKRFLDKALELNMLSLKGHRSVGGIRASLYNAVTIEDVQKLAAFMKKFLEMHQL

SEQ ID NO: 1472 - protein, 370 aa, synthetic construct
MDAPRQVVNFGPGPAKLPHSVLLEIQKELLDYKGVGISVLEMSHRSSDFAKIINNTENLVRELLAVPDNYKVIFLQGGGCGQFSAVPLNLIGLKAGRCADYVVTGAWSAKAAEEAKKFGTINIVHPKLGSYTKIPDPSTWNLNPDASYVYYCANETVHGVEFDFIPDVKGAVLVCDMSSNFLSKPVDVSKFGVIFAGAQKNVGSAGVTVVIVRDDLLGFALRECPSVLEYKVQAGNSSLYNTPPCFSIYVMGLVLEWIKNNGGAAAMEKLSSIKSQTIYEIIDNSQGFYVCPVEPQNRSKMNIPFRIGNAKGDDALEKRFLDKALELNMLSLKGHRSVGGIRASLYNAVPIEDVQKLAAFMKKFLEMHQL

SEQ ID NO: 1473 - protein, 370 aa, synthetic construct
MDAPRQVVNFGPGPAKLPHSVLLEIQKELLDYKGVGISVLEMSHRSSDFAKIINNTENLVRELLAVPDNYKVIFLQGGGCGQFSAVPLNLIGLKAGRCADYVVTGAWSAKAAEEAKKFGTINIVHPKLGSYTKIPDPSTWNLNTDASYVYYCANETVHGVEFDFIPDVKGAVLVCDMSSNFLSKPVDVSKFGVIFAGAQKNVGSAGVTVVIVRDDLLGFALRECPSVLEYKVQAGNSSLYNTPPCFSIYVMGLVLEWIKNNGGAAAMEKLSSIKSQTIYEIIDNSQGFYVCPVEPQNRSKMNIPFRIGNAKGDDALEKRFLDKALELNMLSLKGHRSVGGIRASLYNAVTIEDVQKLAAFMKKFLEMHQL

SEQ ID NO: 1474 - protein, 370 aa, synthetic construct
MDAPRQVVNFGPGPAKLPHSVLLEIQKELLDYKGVGISVLEMSHRSSDFAKIINNTENLVRELLAVPDNYKVIFLQGGGCGQFSAVPLNLIGLKAGRCADYVVTGAWSAKAAEEAKKFGTINIVHPKLGSYTKIPDPSTWNLNPDASYVYYCANETVHGVEFDFIPDVKGAVLVCDMSSNFLSKPVDVSKFGVIFAGAQKNVGSAGVTVVIVRDDLLGFALRECPSVLEYKVQAGNSSLYNTPPCFSIYVMGLVLEWIKNNGGAAAMEKLSSIKSQTIYEIIDNSQGFYVCPVEPQNRSKMNIPFRIGNAKGDDALEKRFLDKALELNMLSLKAHRSVGGIRASLYNAVTIEDVQKLAAFMKKFLEMHQL

SEQ ID NO: 1475 - protein, 370 aa, synthetic construct
MDAPRQVVNFGPGPAKLPHSVLLEIQKELLDYKGVGISVLEMSHRSSDFAKIINNTENLVRELLAVPDNYKVIFLQGGGCGQFSAVPLNLIGLKAGMCADYVVTGAWSAKAAEEAKKFGTINIVHPKLGSYTKIPDPSTWNLNPDASYVYYCANETVHGVEFDFIPDVKGAVLVCDMSSNFLSKPVDVSKFGVIFAGAQKNVGSAGVTVVIVRDDLLGFALRECPSVLEYKVQAGNSSLYNTPPCFSIYVMGLVLEWIKNNGGAAAMEKLSSIKSQTIYEIIDNSQGFYVCPVEPQNRSKMNIPFRIGNAKGDDALEKRFLDKALELNMLSLKGHRSVGGIRASLYNAVTIEDVQKLAAFMKKFLEMHQL

SEQ ID NO: 1476 - protein, 370 aa, synthetic construct
MDAPSQVVNFGPGPAKLPHSVLLEIQKELLDYKGVGISVLEMSHRSSDFAKIINNTENLVRELLAVPDNYKVIFLQGGGCGQFSAVPLNLIGLKAGRCADYVVTGAWSAKAAEEAKKFGTINIVHPKLGSYTKIPDPSTWNLNPDASYVYYCANETVHGVEFDFIPDVKGAVLVCDMSSNFLSKPVDVSKFGVIFAGAQKNVGSAGVTVVIVRDDLLGFALRECPSVLEYKVQAGNSSLYNTPPCFSIYVMGLVLEWIKNNGGAAAMEKLSSIKSQTIYEIIDNSQGFYVCPVEPQNRSKMNIPFRIGNAKGDDALEKRFLDKALELNMLSLKGHRSVGGIRASLYNAVTIEDVQKLAAFMKKFLEMHQL

SEQ ID NO: 1477 - protein, 370 aa, synthetic construct
MDAPRQVVNFGPGPAKLPHSVLLEIQKELLDYKGVGISVLEMSHRSSDFAKIINNTENLVRELLAVPDNYKVIFLQGGGCGQFSAVPLNLIGLKAGRCADYVVTGAWSAKAAEEAKKFGTINIVHPKLGSYTKIPDPSTWNLNPDASYVYYCANETVHGVEFDFIPDVKGAVLVCDMSSNFLSKPVDVSKFGVIFAGAQKNVGSAGVTVVIVRDDLLGFALRECPSVLEYKVQAGKSSLYNTPPCFSIYVMGLVLEWIKNNGGAAAMEKLSSIKSQTIYEIIDNSQGFYVCPVEPQNRSKMNIPFRIGNAKGDDALEKRFLDKALELNMLSLKGHRSVGGIRASLYNAVTIEDVQKLAAFMKKFLEMHQL

SEQ ID NO: 1478 - protein, 370 aa, synthetic construct
MDATRQVVNFGPGPAKLPHSVLLEIQKELLDYKGVGISVLEMSHRSSDFAKIINNTENLVRELLAVPDNYKVIFLQGGGCGQFSAVPLNLIGLKAGRCADYVVTGAWSAKAAEEAKKFGTINIVHPKLGSYTKIPDPSTWNLNPDASYVYYCANETVHGVEFDFIPDVKGAVLVCDMSSNFLSKPVDVSKFGVIFAGAQKNVGSAGVTVVIVRDDLLGFALRECPSVLEYKVQAGNSSLYNTPPCFSIYVMGLVLEWIKNNGGAAAMEKLSSIKSQTIYEIIDNSQGFYVCPVEPQNRSKMNIPFRIGNAKGDDALEKRFLDKALELNMLSLKGHRSVGGIRASLYNAVTIEDVQKLAAFMKKFLEMHQL

SEQ ID NO: 1479 - protein, 370 aa, synthetic construct
MDAPRQVVNFGPGPAKLPHSVLLEIQKELLDYKGVGISVLEMSHRSSDFAKIINNTENLVRELLAVPDNYKVIFLQGGGCGQFSAVPLNLIGLKAGRCADYVVTGAWSAKAAEEAKKFGTINIVHPKLGSYTKIPDPSTWNLNPDASYVYYCANETVHGVEFDFIPDVKGAVLVCDMSSNFLSKPVDVSKFGVIFAGAQKNVGSAGVTVVIVRDDLLGFALRECPSVLEYKVQAGNSSLYNSPPCFSIYVMGLVLEWIKNNGGAAAMEKLSSIKSQTIYEIIDNSQGFYVCPVEPQNRSKMNIPFRIGNAKGDDALEKRFLDKALELNMLSLKGHRSVGGIRASLYNAVTIEDVQKLAAFMKKFLEMHQL

SEQ ID NO: 1480 - protein, 370 aa, synthetic construct
MDAPRQVVNFGPGPAKLPHSVLLEIRKELLDYKGVGISVLEMSHRSSDFAKIINNTENLVRELLAVPDNYKVIFLQGGGCGQFSAVPLNLIGLKAGRCADYVVTGAWSAKAAEEAKKFGTINIVHPKLGSYTKIPDPSTWNLNPDASYVYYCANETVHGVEFDFIPDVKGAVLVCDMSSNFLSKPVDVSKFGVIFAGAQKNVGSAGVTVVIVRDDLLGFALRECPSVLEYKVQAGNSSLYNTPPCFSIYVMGLVLEWIKNNGGAAAMEKLSSIKSQTIYEIIDNSQGFYVCPVEPQNRSKMNIPFRIGNAKGDDALEKRFLDKALELNMLSLKGHRSVGGIRASLYNAVTIEDVQKLAAFMKKFLEMHQL

SEQ ID NO: 1481 - protein, 370 aa, synthetic construct
MDAPRQVVNFGPGPAKLPHSVLLEIQKELLDYKGVGISVLEMSHRSSDFAKIINNTENLVRELLAVPDNYKVIFLQGGGCGQFSAVPLNLIGLKAGTCADYVVTGAWSAKAAEEAKKFGTINIVHPKLGSYTKIPDPSTWNLNPDASYVYYCANETVHGVEFDFIPDVKGAVLVCDMSSNFLSKPVDVSKFGVIFAGAQKNVGSAGVTVVIVRDDLLGFALRECPSVLEYKVQAGNSSLYNTPPCFSIYVMGLVLEWIKNNGGAAAMEKLSSIKSQTIYEIIDNSQGFYVCPVEPQNRSKMNIPFRIGNAKGDDALEKRFLDKALELNMLSLKGHRSVGGIRASLYNAVTIEDVQKLAAFMKKFLEMHQL

SEQ ID NO: 1482 - protein, 370 aa, synthetic construct
MDAPRQVVNFGPGPAKLPHSVLLEIQKELLDYKGVGISVLEMSHRSSDFAKIINNTENLVRELLAVPDNYKVIFLQGGGCGQFSAVPLNLIGLKAGRCADYVVTGAWSAKAAEEAKKFGTINIVHPKLGSYTKIPDPSTWNLNPDASYVYYCANETVHGVEFDFIPDVKGAVLVCDMSSNFLSKPVDVSKFGVIFAGAQKNVGSAGVTVVIVRDDLLGFALRECPSVLEYKVQAGNSSLYNTPPCFSIYVMGLVLEWIKNNGGAAAMEKLSSIKSQTIYEIIDNSQGFYVCPVEPQNRSKMIIPFRIGNAKGDDALEKRFLDKALELNMLSLKGHRSVGGIRASLYNAVTIEDVQKLAAFMKKFLEMHQL

SEQ ID NO: 1483 - protein, 370 aa, synthetic construct
MDAPRQVVNFGPGPAKLPHSVLLEIQKELLDYKGVGISVLEMSHRSSDFAKIINNTENLVRELLAVPDNYKVIFLQGGGCGQFSAVPLNLIGLKAGRCADYVVTGAWSAKAAEEAKKFGTINIVHPKLGSYTKIPDPSTWNLNPDASFVYYCANETVHGVEFDFIPDVKGAVLVCDMSSNFLSKPVDVSKFGVIFAGAQKNVGSAGVTVVIVRDDLLGFALRECPSVLEYKVQAGNSSLYNTPPCFSIYVMGLVLEWIKNNGGAAAMEKLSSIKSQTIYEIIDNSQGFYVCPVEPQNRSKMNIPFRIGNAKGDDALEKRFLDKALELNMLSLKGHRSVGGIRASLYNAVTIEDVQKLAAFMKKFLEMHQL

SEQ ID NO: 1484 - protein, 370 aa, synthetic construct
MDAPRQVVNFGPGPAKLPHSVLLEIQKELLDYKGVGISVLEMSHRSSDFAKIINNIENLVRELLAVPDNYKVIFLQGGGCGQFSAVPLNLIGLKAGRCADYVVTGAWSAKAAEEAKKFGTINIVHPKLGSYTKIPDPSTWNLNPDASYVYYCANETVHGVEFDFIPDVKGAVLVCDMSSNFLSKPVDVSKFGVIFAGAQKNVGSAGVTVVIVRDDLLGFALRECPSVLEYKVQAGNSSLYNTPPCFSIYVMGLVLEWIKNNGGAAAMEKLSSIKSQTIYEIIDNSQGFYVCPVEPQNRSKMNIPFRIGNAKGDDALEKRFLDKALELNMLSLKGHRSVGGIRASLYNAVTIEDVQKLAAFMKKFLEMHQL

SEQ ID NO: 1485 - protein, 370 aa, synthetic construct
MDAPRQVVNFGPGPAKLPHSVLLKIQKELLDYKGVGISVLEMSHRSSDFAKIINNTENLVRELLAVPDNYKVIFLQGGGCGQFSAVPLNLIGLKAGRCADYVVTGAWSAKAAEEAKKFGTINIVHPKLGSYTKIPDPSTWNLNPDASYVYYCANETVHGVEFDFIPDVKGAVLVCDMSSNFLSKPVDVSKFGVIFAGAQKNVGSAGVTVVIVRDDLLGFALRECPSVLEYKVQAGNSSLYNTPPCFSIYVMGLVLEWIKNNGGAAAMEKLSSIKSQTIYEIIDNSQGFYVCPVEPQNRSKMNIPFRIGNAKGDDALEKRFLDKALELNMLSLKGHRSVGGIRASLYNAVTIEDVQKLAAFMKKFLEMHQL

SEQ ID NO: 1486 - protein, 370 aa, synthetic construct
MDAPRQVVNFGPGPAKLPHSVLLEIQKELLDYKGVGISVLEMSHRSSDFAKIINNTENLVRELLAVPDNYKVIFLQGGGCGQFSAVPLNLIGLKAGRCADYVVTGAWSAKAAEEAKKFGTINIVHPKLGSYTKIPDPSTWNLNPDASYVYYCANETVHGVEFDFIPDVEGAVLVCDMSSNFLSKPVDVSKFGVIFAGAQKNVGSAGVTVVIVRDDLLGFALRECPSVLEYKVQAGNSSLYNTPPCFSIYVMGLVLEWIKNNGGAAAMEKLSSIKSQTIYEIIDNSQGFYVCPVEPQNRSKMNIPFRIGNAKGDDALEKRFLDKALELNMLSLKGHRSVGGIRASLYNAVTIEDVQKLAAFMKKFLEMHQL

SEQ ID NO: 1487 - protein, 370 aa, synthetic construct
MDAPRQVVNFGPGPAKLPHSVLLEIQKELLDYKGVGISVLEMSHRSSDFAKIINNTENLVRELLAVPENYKVIFLQGGGCGQFSAVPLNLIGLKAGRCADYVVTGAWSAKAAEEAKKFGTINIVHPKLGSYTKIPDPSTWNLNPDASYVYYCANETVHGVEFDFIPDVKGAVLVCDMSSNFLSKPVDVSKFGVIFAGAQKNVGSAGVTVVIVRDDLLGFALRECPSVLEYKVQAGNSSLYNTPPCFSIYVMGLVLEWIKNNGGAAAMEKLSSIKSQTIYEIIDNSQGFYVCPVEPQNRSKMNIPFRIGNAKGDDALEKRFLDKALELNMLSLKGHRSVGGIRASLYNAVTIEDVQKLAAFMKKFLEMHQL

SEQ ID NO: 1488 - protein, 370 aa, synthetic construct
MDAPRQVVNFGPGPAKLPHSVLLEIQKELLDYKGVGISVLEMSHRSSDFAKIINNTENLVRELLAVPDNYKVIFLQGGGCGQFSAVPLNLIGLKAGRCADYVVTGAWSAKAAEEAKKFGTINIVHPKLGSYTKIPDPSTWNLNPDASYVYYCANETVHGVEFDFIPDVKGAVLVCDMSSNFLSKPVDVSKFGVIFAGAQKNVGSAGVTVVIVRDDLLGFALRECPSVLEYKVQAGNSSLYNTPPCFSICVMGLVLEWIKNNGGAAAMEKLSSIKSQTIYEIIDNSQGFYVCPVEPQNRSKMNIPFRIGNAKGDDALEKRFLDKALELNMLSLKGHRSVGGIRASLYNAVTIEDVQKLAAFMKKFLEMHQL

SEQ ID NO: 1489 - protein, 370 aa, synthetic construct
MDAPRQVVNFGPGPAKQPHSVLLEIQKELLDYKGVGISVLEMSHRSSDFAKIINNTENLVRELLAVPDNYKVIFLQGGGCGQFSAVPLNLIGLKAGRCADYVVTGAWSAKAAEEAKKFGTINIVHPKLGSYTKIPDPSTWNLNPDASYVYYCANETVHGVEFDFIPDVKGAVLVCDMSSNFLSKPVDVSKFGVIFAGAQKNVGSAGVTVVIVRDDLLGFALRECPSVLEYKVQAGNSSLYNTPPCFSIYVMGLVLEWIKNNGGAAAMEKLSSIKSQTIYEIIDNSQGFYVCPVEPQNRSKMNIPFRIGNAKGDDALEKRFLDKALELNMLSLKGHRSVGGIRASLYNAVTIEDVQKLAAFMKKFLEMHQL

SEQ ID NO: 1490 - protein, 370 aa, synthetic construct
MDAPRQVVNFGPGPAKLPHSVLLEIQKELLDYKGVGISVLEMSHRSSDFAKIINNTENLVRELLAVPDNYKVIFLQGGGCGQFSAVPLNLIGLKAGRCADYVVTGAWSAKAAEEAKKFGTINIVHPKLGSYTKIPDPSTWNLNPDASYVYYCANETVHGVEFDFIPDVKGAVLVCDMSSNFLSKPVDVSKFGVIFAGAQKNVGSAGVTVVIVRDDLLGFALRECPSVLAYKVQAGNSSLYNTPPCFSIYVMGLVLEWIKNNGGAAAMEKLSSIKSQTIYEIIDNSQGFYVCPVEPQNRSKMNIPFRIGNAKGDDALEKRFLDKALELNMLSLKGHRSVGGIRASLYNAVTIEDVQKLAAFMKKFLEMHQL

SEQ ID NO: 1491 - protein, 370 aa, synthetic construct
MDAPRQVVNFGPGPAKLPHSVLLEIQKELLDYKGVGISVLEMSHRSSDFAKIINNTENLVREVLAVPDNYKVIFLQGGGCGQFSAVPLNLIGLKAGRCADYVVTGAWSAKAAEEAKKFGTINIVHPKLGSYTKIPDPSTWNLNPDASYVYYCANETVHGVEFDFIPDVKGAVLVCDMSSNFLSKPVDVSKFGVIFAGAQKNVGSAGVTVVIVRDDLLGFALRECPSVLEYKVQAGNSSLYNTPPCFSIYVMGLVLEWIKNNGGAAAMEKLSSIKSQTIYEIIDNSQGFYVCPVEPQNRSKMNIPFRIGNAKGDDALEKRFLDKALELNMLSLKGHRSVGGIRASLYNAVTIEDVQKLAAFMKKFLEMHQL

SEQ ID NO: 1492 - protein, 370 aa, synthetic construct
MDARRQVVNFGPGPAKLPHSVLLEIQKELLDYKGVGISVLEMSHRSSDFAKIINNTENLVRELLAVPDNYKVIFLQGGGCGQFSAVPLNLIGLKAGRCADYVVTGAWSAKAAEEAKKFGTINIVHPKLGSYTKIPDPSTWNLNPDASYVYYCANETVHGVEFDFIPDVKGAVLVCDMSSNFLSKPVDVSKFGVIFAGAQKNVGSAGVTVVIVRDDLLGFALRECPSVLEYKVQAGNSSLYNTPPCFSIYVMGLVLEWIKNNGGAAAMEKLSSIKSQTIYEIIDNSQGFYVCPVEPQNRSKMNIPFRIGNAKGDDALEKRFLDKALELNMLSLKGHRSVGGIRASLYNAVTIEDVQKLAAFMKKFLEMHQL

SEQ ID NO: 1493 - protein, 370 aa, synthetic construct
MDAPRQVVNFGPGPAKLPHSVLLEIQKELLDYKGVGNSVLEMSHRSSDFAKIINNTENLVRELLAVPDNYKVIFLQGGGCGQFSAVPLNLIGLKAGRCADYVVTGAWSAKAAEEAKKFGTINIVHPKLGSYTKIPDPSTWNLNPDASYVYYCANETVHGVEFDFIPDVKGAVLVCDMSSNFLSKPVDVSKFGVIFAGAQKNVGSAGVTVVIVRDDLLGFALRECPSVLEYKVQAGNSSLYNTPPCFSIYVMGLVLEWIKNNGGAAAMEKLSSIKSQTIYEIIDNSQGFYVCPVEPQNRSKMNIPFRIGNAKGDDALEKRFLDKALELNMLSLKGHRSVGGIRASLYNAVTIEDVQKLAAFMKKFLEMHQL

SEQ ID NO: 1494 - protein, 370 aa, synthetic construct
MDAPRQVVNFGPGPAKLPHSVLLEIQKELLDYKGVGISVLEMSHRSSDFAKIINNTENLVRELLAVPDNYKVIFLQGGGGGQFSAVPLNLIGLKAGRCADYVVTGAWSAKAAEEAKKFGTINIVHPKLGSYTKIPDPSTWNLNPDASYVYYCANETVHGVEFDFIPDVKGAVLVCDMSSNFLSKPVDVSKFGVIFAGAQKNVGSAGVTVVIVRDDLLGFALRECPSVLEYKVQAGNSSLYNTPPCFSIYVMGLVLEWIKNNGGAAAMEKLSSIKSQTIYEIIDNSQGFYVCPVEPQNRSKMNIPFRIGNAKGDDALEKRFLDKALELNMLSLKGHRSVGGIRASLYNAVTIEDVQKLAAFMKKFLEMHQL

SEQ ID NO: 1495 - protein, 370 aa, synthetic construct
MDAPRQVVNFGPGPAKLPHSVLLEIQKELLDYKGVGISVLEMSHRSSDFAKIINNTENLVRELLAVPDNYKVIFLQGGGCGQFSAVPLNLIGLKAGRCADYVVTGAWSAKAAEEAKKFGTINIVHPKLGSYTKIPDPSTWNLNPDASYVYYCANETVHGVEFDFIPDVKGAVLVCDMSSNFLSKPVDVSKFGVIFAGAQKNVGSAGVTVVIVRDDLLGFALRECPSVLEYKVQAGNSSLYNTPPCFSIYVMGLVLEWIKNNGGAAAMEKLSSIKSQTIYEIIDNSQGFYVCPVEPQNRSKMNIPFRIGNAKGDDALEKRFLDKALELNMLSLKGHRSVGGIRASLYNAVTIEDVQKMAAFMKKFLEMHQL

SEQ ID NO: 1496 - protein, 370 aa, synthetic construct
MDAPRQVVNFGPGPAKLPHSVLLEIQKELLDYKGVGISVLEMSHRSSDFAKIINNTENLVRELLAVPDNYKVIFLQGGGCGQFSAVPLNLIGLKAGRCADYVVTGAWSAKAAEEAKKFGTINIVHPKLGSYTKIPDPSTWNLNPDASYVYYCANETVHGVEFDFIPDVKGAVLVCDMSSNFLSKPVDVSKFGVIFAGAQKNVGSAGVTVVIVRDDLLGFALRECPSVLEYKVQAGNSSLYNTPPCFSIYVMGLVLEWIKNNGGAAAMEKLSSIKSQTIYEIIDNSQGFYVCPVEPQNRSKMNIPFRIGNSKGDDALEKRFLDKALELNMLSLKGHRSVGGIRASLYNAVTIEDVQKLAAFMKKFLEMHQL

SEQ ID NO: 1497 - protein, 370 aa, synthetic construct
MDAPRQVVNFGPGPAKLPHSVLLEIQKELLDYKGVGISVLEMSHRSSDFAKIINTTENLVRELLAVPDNYKVIFLQGGGCGQFSAVPLNLIGLKAGRCADYVVTGAWSAKAAEEAKKFGTINIVHPKLGSYTKIPDPSTWNLNPDASYVYYCANETVHGVEFDFIPDVKGAVLVCDMSSNFLSKPVDVSKFGVIFAGAQKNVGSAGVTVVIVRDDLLGFALRECPSVLEYKVQAGNSSLYNTPPCFSIYVMGLVLEWIKNNGGAAAMEKLSSIKSQTIYEIIDNSQGFYVCPVEPQNRSKMNIPFRIGNAKGDDALEKRFLDKALELNMLSLKGHRSVGGIRASLYNAVTIEDVQKLAAFMKKFLEMHQL

SEQ ID NO: 1498 - protein, 370 aa, synthetic construct
MDAPRQVVNFGPGPAKLPHSVLLEIQKELLDYKGVGISVLEMSHRSSDFAKIINNTENLVRELLAVPDNYKVIFLQGGGCGQFSAVPLNLIGLKAGRCADYVVTGAWSAKAAEEAKKFGTINIVHPKLGSYTKIPDPSTWNLNQDASYVYYCANETVHGVEFDFIPDVKGAVLVCDMSSNFLSKPVDVSKFGVIFAGAQKNVGSAGVTVVIVRDDLLGFALRECPSVLEYKVQAGNSSLYNTPPCFSIYVMGLVLEWIKNNGGAAAMEKLSSIKSQTIYEIIDNSQGFYVCPVEPQNRSKMNIPFRIGNAKGDDALEKRFLDKALELNMLSLKGHRSVGGIRASLYNAVTIEDVQKLAAFMKKFLEMHQL

SEQ ID NO: 1499 - protein, 370 aa, synthetic construct
MDAPRQVVNFGPGPAKLPHSVLLEIQKELLDYKGVGISVLEMSHRSSDFAKIINNTENLVRELLAVPDNYKVIFLQGGGCGQFSAVPLNLIGLKAGRCADYVVTGAWSTKAAEEAKKFGTINIVHPKLGSYTKIPDPSTWNLNPDASYVYYCANETVHGVEFDFIPDVKGAVLVCDMSSNFLSKPVDVSKFGVIFAGAQKNVGSAGVTVVIVRDDLLGFALRECPSVLEYKVQAGNSSLYNTPPCFSIYVMGLVLEWIKNNGGAAAMEKLSSIKSQTIYEIIDNSQGFYVCPVEPQNRSKMNIPFRIGNAKGDDALEKRFLDKALELNMLSLKGHRSVGGIRASLYNAVTIEDVQKLAAFMKKFLEMHQL

SEQ ID NO: 1500 - protein, 370 aa, synthetic construct
MDAPRQVVNFGPGPSKLPHSVLLEIQKELLDYKGVGISVLEMSHRSSDFAKIINNTENLVRELLAVPDNYKVIFLQGGGCGQFSAVPLNLIGLKAGRCADYVVTGAWSAKAAEEAKKFGTINIVHPKLGSYTKIPDPSTWNLNPDASYVYYCANETVHGVEFDFIPDVKGAVLVCDMSSNFLSKPVDVSKFGVIFAGAQKNVGSAGVTVVIVRDDLLGFALRECPSVLEYKVQAGNSSLYNTPPCFSIYVMGLVLEWIKNNGGAAAMEKLSSIKSQTIYEIIDNSQGFYVCPVEPQNRSKMNIPFRIGNAKGDDALEKRFLDKALELNMLSLKGHRSVGGIRASLYNAVTIEDVQKLAAFMKKFLEMHQL

SEQ ID NO: 1501 - protein, 370 aa, synthetic construct
MDAPRQVVNFGPGPAKLPHSVLLEIQKELLDYKGVGISVLEMSHRSSDFAKIINNTENLVRELLAVPDNYKVIFLQGGGCGQFSGVPLNLIGLKAGRCADYVVTGAWSAKAAEEAKKFGTINIVHPKLGSYTKIPDPSTWNLNPDASYVYYCANETVHGVEFDFIPDVKGAVLVCDMSSNFLSKPVDVSKFGVIFAGAQKNVGSAGVTVVIVRDDLLGFALRECPSVLEYKVQAGNSSLYNTPPCFSIYVMGLVLEWIKNNGGAAAMEKLSSIKSQTIYEIIDNSQGFYVCPVEPQNRSKMNIPFRIGNAKGDDALEKRFLDKALELNMLSLKGHRSVGGIRASLYNAVTIEDVQKLAAFMKKFLEMHQL

SEQ ID NO: 1502 - protein, 370 aa, synthetic construct
MDAPRQVVNFGPGPAKLPHSVLLEIQKELLDYKGVGISVLEMSHRSSDFAKIINNTENLVRELLAVPDNYKVIFLQGGGCGQFSAVPLNLIGLKAGRCADYVVTGAWSAKAAEEAKKFGTINIVHPKLGSYTKIPDPSTWNLNPDASYVYYCANETVHGVEFDFIPDVKGAVLVCDMSSNFLSKPVDVSKFGVIFAGAQKNVGSAGVTVVIVRDDLLGFALRECPSVLEYKVQAGNSSLYNTPPCFSIYVMGLVLEWIKNNGGAAAMEKLSSIKSQTIYEIIDNSQGFYVCPVEPQNRSKMNIPFRIGNAKGDDALEKRFLDKALELNMLSLKGHRSVGGIRASLYNAVTIEEVQKLAAFMKKFLEMHQL

SEQ ID NO: 1503 - protein, 370 aa, synthetic construct
MDAPRQVVNFGPGPAKLPHSVLLEIQKELLDYKGVGISVLEMSHRSSGFAKIINNTENLVRELLAVPDNYKVIFLQGGGCGQFSAVPLNLIGLKAGRCADYVVTGAWSAKAAEEAKKFGTINIVHPKLGSYTKIPDPSTWNLNPDASYVYYCANETVHGVEFDFIPDVKGAVLVCDMSSNFLSKPVDVSKFGVIFAGAQKNVGSAGVTVVIVRDDLLGFALRECPSVLEYKVQAGNSSLYNTPPCFSIYVMGLVLEWIKNNGGAAAMEKLSSIKSQTIYEIIDNSQGFYVCPVEPQNRSKMNIPFRIGNAKGDDALEKRFLDKALELNMLSLKGHRSVGGIRASLYNAVTIEDVQKLAAFMKKFLEMHQL

SEQ ID NO: 1504 - protein, 370 aa, synthetic construct
MDAPRQVVNFGPGPAKLPHSVLLEIQKELLDYKGVGISVLEMSHRSSDFAKIINNTENLVRELLAVPDNYKVIFLQGGGCGQFSAVPLNLIGLKAGRCADYVVTGAWSAKAAEEAKKFGTINIVHPKLGSYTKIPDPSTWNLNPDASYVYYCANETVHGVEFDFIPDVKGAVLVCDMSSDFLSKPVDVSKFGVIFAGAQKNVGSAGVTVVIVRDDLLGFALRECPSVLEYKVQAGNSSLYNTPPCFSIYVMGLVLEWIKNNGGAAAMEKLSSIKSQTIYEIIDNSQGFYVCPVEPQNRSKMNIPFRIGNAKGDDALEKRFLDKALELNMLSLKGHRSVGGIRASLYNAVTIEDVQKLAAFMKKFLEMHQL

SEQ ID NO: 1505 - protein, 370 aa, synthetic construct
MDAPRQVVNFGPGPAKLPHSVLLEIQKELLDYKGVGISVLEMSHRSSDFAKIINNTENLVRELLAVPDNYKVIFLQGGGCGQFSAVPLNLIGLKAGRCADYVVTGAWSAKAAEEAQKFGTINIVHPKLGSYTKIPDPSTWNLNPDASYVYYCANETVHGVEFDFIPDVKGAVLVCDMSSNFLSKPVDVSKFGVIFAGAQKNVGSAGVTVVIVRDDLLGFALRECPSVLEYKVQAGNSSLYNTPPCFSIYVMGLVLEWIKNNGGAAAMEKLSSIKSQTIYEIIDNSQGFYVCPVEPQNRSKMNIPFRIGNAKGDDALEKRFLDKALELNMLSLKGHRSVGGIRASLYNAVTIEDVQKLAAFMKKFLEMHQL

SEQ ID NO: 1506 - protein, 370 aa, synthetic construct
MDAPRQVVNFGPGPAKLPHSVLLEIQKELLDYKGVGISVLEMSHRSSDFAKIINNTENLVRELLAVPDNYKVIFLQGGGCGQFSAVPLNLIGLKAGRCADYVVTGAWSAKAAEEAKKFGTTNIVHPKLGSYTKIPDPSTWNLNPDASYVYYCANETVHGVEFDFIPDVKGAVLVCDMSSNFLSKPVDVSKFGVIFAGAQKNVGSAGVTVVIVRDDLLGFALRECPSVLEYKVQAGNSSLYNTPPCFSIYVMGLVLEWIKNNGGAAAMEKLSSIKSQTIYEIIDNSQGFYVCPVEPQNRSKMNIPFRIGNAKGDDALEKRFLDKALELNMLSLKGHRSVGGIRASLYNAVTIEDVQKLAAFMKKFLEMHQL

SEQ ID NO: 1507 - protein, 370 aa, synthetic construct
MDAPRQVVNFGPGPAKLPHSVLLEIQKELLDYKGVGISVLEMSHRASDFAKIINNTENLVRELLAVPDNYKVIFLQGGGCGQFSAVPLNLIGLKAGRCADYVVTGAWSAKAAEEAKKFGTINIVHPKLGSYTKIPDPSTWNLNPDASYVYYCANETVHGVEFDFIPDVKGAVLVCDMSSNFLSKPVDVSKFGVIFAGAQKNVGSAGVTVVIVRDDLLGFALRECPSVLEYKVQAGNSSLYNTPPCFSIYVMGLVLEWIKNNGGAAAMEKLSSIKSQTIYEIIDNSQGFYVCPVEPQNRSKMNIPFRIGNAKGDDALEKRFLDKALELNMLSLKGHRSVGGIRASLYNAVTIEDVQKLAAFMKKFLEMHQL

SEQ ID NO: 1508 - protein, 370 aa, synthetic construct
MDAPRQVVNFGPGPAKLPHSVLLEIQKELLDYKGVGISVLEMSHRSSDFAKIINNTENLVRELLAVPDNYKVIFLQGGGCGQFSAVPLNLIGLKAGRCADYVVTGAWSAKAAEEAKKFGTINIVHPKLGSYTKIPDPSTWNLNPDASYVYYCANETVHGVEFDFIPDVKGAVLVCDMSSNFLSKPVDVSKFGVIFAGAQKNVGSAGVTVVIVRDDLLGFALRECPSVLEYKVQAGNSSLYNTPPCFSIYVMGSVLEWIKNNGGAAAMEKLSSIKSQTIYEIIDNSQGFYVCPVEPQNRSKMNIPFRIGNAKGDDALEKRFLDKALELNMLSLKGHRSVGGIRASLYNAVTIEDVQKLAAFMKKFLEMHQL

SEQ ID NO: 1509 - protein, 370 aa, synthetic construct
MDAPRQVVNFGPGPAKLPHSVLLEIQKELLYYKGVGISVLEMSHRSSDFAKIINNTENLVRELLAVPDNYKVIFLQGGGCGQFSAVPLNLIGLKAGRCADYVVTGAWSAKAAEEAKKFGTINIVHPKLGSYTKIPDPSTWNLNPDASYVYYCANETVHGVEFDFIPDVKGAVLVCDMSSNFLSKPVDVSKFGVIFAGAQKNVGSAGVTVVIVRDDLLGFALRECPSVLEYKVQAGNSSLYNTPPCFSIYVMGLVLEWIKNNGGAAAMEKLSSIKSQTIYEIIDNSQGFYVCPVEPQNRSKMNIPFRIGNAKGDDALEKRFLDKALELNMLSLKGHRSVGGIRASLYNAVTIEDVQKLAAFMKKFLEMHQL

SEQ ID NO: 1510 - protein, 370 aa, synthetic construct
MDAPRQVVNFGPGPAKLPHSVLLEIQKELLDYKGVGISVLEMSHRSSDFAKIINNTENLVRELLAVPDNYKVIFLQGGGCGQFSAVPLNLIGLKAGRCADYVVTGAWSAKAAEEAKKFGTINIVHPKLGSYTKIPDPSTWNLNPDASYVYYCANETLHGVEFDFIPDVKGAVLVCDMSSNFLSKPVDVSKFGVIFAGAQKNVGSAGVTVVIVRDDLLGFALRECPSVLEYKVQAGNSSLYNTPPCFSIYVMGLVLEWIKNNGGAAAMEKLSSIKSQTIYEIIDNSQGFYVCPVEPQNRSKMNIPFRIGNAKGDDALEKRFLDKALELNMLSLKGHRSVGGIRASLYNAVTIEDVQKLAAFMKKFLEMHQL

SEQ ID NO: 1511 - protein, 370 aa, synthetic construct
MDAPRQVVNFGPGPAKLPHSVLLEIQKELLDYKGVGISVLEMSHRSSDFAKIINNTENLVRELLAVPDNYKVIFLQGGGCGQFSAVPLNLIGLKAGRCADYVVTGAWSAKAAEEATKFGTINIVHPKLGSYTKIPDPSTWNLNPDASYVYYCANETVHGVEFDFIPDVKGAVLVCDMSSNFLSKPVDVSKFGVIFAGAQKNVGSAGVTVVIVRDDLLGFALRECPSVLEYKVQAGNSSLYNTPPCFSIYVMGLVLEWIKNNGGAAAMEKLSSIKSQTIYEIIDNSQGFYVCPVEPQNRSKMNIPFRIGNAKGDDALEKRFLDKALELNMLSLKGHRSVGGIRASLYNAVTIEDVQKLAAFMKKFLEMHQL

SEQ ID NO: 1512 - protein, 370 aa, synthetic construct
MDAPRQVVNFGPGPAKLPHSVLLEIQKELLDYKGVGISVLEMSHRSSDYAKIINNTENLVRELLAVPDNYKVIFLQGGGCGQFSAVPLNLIGLKAGRCADYVVTGAWSAKAAEEAKKFGTINIVHPKLGSYTKIPDPSTWNLNPDASYVYYCANETVHGVEFDFIPDVKGAVLVCDMSSNFLSKPVDVSKFGVIFAGAQKNVGSAGVTVVIVRDDLLGFALRECPSVLEYKVQAGNSSLYNTPPCFSIYVMGLVLEWIKNNGGAAAMEKLSSIKSQTIYEIIDNSQGFYVCPVEPQNRSKMNIPFRIGNAKGDDALEKRFLDKALELNMLSLKGHRSVGGIRASLYNAVTIEDVQKLAAFMKKFLEMHQL

SEQ ID NO: 1513 - protein, 370 aa, synthetic construct
MDAPRQVVNFGPGPAKLPHSVLLEIQKELLDYKGVGISVLEMSHRSSDFAKIINNTENLVRELLAVPDNYKVIFLQGGGCGQFSAVPLNLIGLKAGRCADYVVTGAWSAKAAEEAKKFGTINIVHPKLGSYTKIPDPSTWNLNPDASYVYYCANETVHGVEFDFIPDVKGAVLVCDMSSNFLSKPVDVSKFGVIFAGAQKNVGSAGVTVVIVRDDLLGFALRECPSVLEYKVQAGNSSLYNTPPCFSIYVMGLVLEWIKNNGGAAAMEKLSSIKSQTIYEIIDNSQGFYVCPVEPQNRSKMNIPFRIGNAQGDDALEKRFLDKALELNMLSLKGHRSVGGIRASLYNAVTIEDVQKLAAFMKKFLEMHQL

SEQ ID NO: 1514 - protein, 370 aa, synthetic construct
MDAPRQVVNFGPGPAKLPHSVLLEIQKELLDYKGVGISVLEMSHRSSDFAKIINNTENLVRELLAVPDNYKVIFLQGGGCGQFSAVPLNLIGLKAGRCADYVVTGAWSAKAAEEAKKFGTINIVHPKLGSYTKIPDPSTWNLNPDASYVYYCANETMHGVEFDFIPDVKGAVLVCDMSSNFLSKPVDVSKFGVIFAGAQKNVGSAGVTVVIVRDDLLGFALRECPSVLEYKVQAGNSSLYNTPPCFSIYVMGLVLEWIKNNGGAAAMEKLSSIKSQTIYEIIDNSQGFYVCPVEPQNRSKMNIPFRIGNAKGDDALEKRFLDKALELNMLSLKGHRSVGGIRASLYNAVTIEDVQKLAAFMKKFLEMHQL

SEQ ID NO: 1515 - protein, 370 aa, synthetic construct
MDAPRQVVNFGPGPAKLPHSVLLEIQKELLDYKGVGISVLEMSHRSSDFAKIINNTENLVRELLAVPDNYKVIFLQGGGCGQFSAVPLNLIGLKAGRCADYVVTGAWSAKAAEEAKKFGTINIVHPKLGSYTKIPDPSTWNLNRDASYVYYCANETVHGVEFDFIPDVKGAVLVCDMSSNFLSKPVDVSKFGVIFAGAQKNVGSAGVTVVIVRDDLLGFALRECPSVLEYKVQAGNSSLYNTPPCFSIYVMGLVLEWIKNNGGAAAMEKLSSIKSQTIYEIIDNSQGFYVCPVEPQNRSKMNIPFRIGNAKGDDALEKRFLDKALELNMLSLKGHRSVGGIRASLYNAVTIEDVQKLAAFMKKFLEMHQL

SEQ ID NO: 1516 - protein, 370 aa, synthetic construct
MDAPRQVVNFGPGPAKLPHSVLLEIQKELLDYKGVGISVLEMSHRSSDFAKIINNTENLVRELLAVPDNYKVIFLQGGGCGQFSAVPLNLIGLKAGRCADYVVTGAWSAKAAEEAKKFGTINIVHPKLGSYTKIPDPSTWNLNPDASYVYYCANETVHGVEFDFIPDVKGAVLVCDMSSNFLSKPVDVSKFGVIFAGAQKNVGSAGVTVVIVRDDLLGFARRECPSVLEYKVQAGNSSLYNTPPCFSIYVMGLVLEWIKNNGGAAAMEKLSSIKSQTIYEIIDNSQGFYVCPVEPQNRSKMNIPFRIGNAKGDDALEKRFLDKALELNMLSLKGHRSVGGIRASLYNAVTIEDVQKLAAFMKKFLEMHQL

SEQ ID NO: 1517 - protein, 370 aa, synthetic construct
MDAPRQVVNFGPGPAKLPHSVLLEIQKELLAYKGVGISVLEMSHRSSDFAKIINNTENLVRELLAVPDNYKVIFLQGGGCGQFSAVPLNLIGLKAGRCADYVVTGAWSAKAAEEAKKFGTINIVHPKLGSYTKIPDPSTWNLNPDASYVYYCANETVHGVEFDFIPDVKGAVLVCDMSSNFLSKPVDVSKFGVIFAGAQKNVGSAGVTVVIVRDDLLGFALRECPSVLEYKVQAGNSSLYNTPPCFSIYVMGLVLEWIKNNGGAAAMEKLSSIKSQTIYEIIDNSQGFYVCPVEPQNRSKMNIPFRIGNAKGDDALEKRFLDKALELNMLSLKGHRSVGGIRASLYNAVTIEDVQKLAAFMKKFLEMHQL

SEQ ID NO: 1518 - protein, 370 aa, synthetic construct
MDAPRQVVNFGPGPAKLPHSVLLEIQKELLDYKGVGISVLEMSHRSSDFAKIINNTENLVRELLAVPDNYKVIFLQGGGCGQFSAVPLNLIGLKPGRCADYVVTGAWSAKAAEEAKKFGTINIVHPKLGSYTKIPDPSTWNLNPDASYVYYCANETVHGVEFDFIPDVKGAVLVCDMSSNFLSKPVDVSKFGVIFAGAQKNVGSAGVTVVIVRDDLLGFALRECPSVLEYKVQAGNSSLYNTPPCFSIYVMGLVLEWIKNNGGAAAMEKLSSIKSQTIYEIIDNSQGFYVCPVEPQNRSKMNIPFRIGNAKGDDALEKRFLDKALELNMLSLKGHRSVGGIRASLYNAVTIEDVQKLAAFMKKFLEMHQL

SEQ ID NO: 1519 - protein, 370 aa, synthetic construct
MDAPRQVVNFGPGPAKLPHSVLLEIQKELLDYKGVGISVLEMSHRSSDFAKIINNTENLVRELLAVPDNYKVIFLQGGGCGQFSAVPLNLIGLKAGRCADYVVTGAWSAMAAEEAKKFGTINIVHPKLGSYTKIPDPSTWNLNPDASYVYYCANETVHGVEFDFIPDVKGAVLVCDMSSNFLSKPVDVSKFGVIFAGAQKNVGSAGVTVVIVRDDLLGFALRECPSVLEYKVQAGNSSLYNTPPCFSIYVMGLVLEWIKNNGGAAAMEKLSSIKSQTIYEIIDNSQGFYVCPVEPQNRSKMNIPFRIGNAKGDDALEKRFLDKALELNMLSLKGHRSVGGIRASLYNAVTIEDVQKLAAFMKKFLEMHQL

SEQ ID NO: 1520 - protein, 370 aa, synthetic construct
MDAPRQVVNFGPGPAKLPHSVLLEIQKELLDYKGVGISVLEMSHRSSDFAKIINNTENLVRELLAVPDNYKVLFLQGGGCGQFSAVPLNLIGLKAGRCADYVVTGAWSAKAAEEAKKFGTINIVHPKLGSYTKIPDPSTWNLNPDASYVYYCANETVHGVEFDFIPDVKGAVLVCDMSSNFLSKPVDVSKFGVIFAGAQKNVGSAGVTVVIVRDDLLGFALRECPSVLEYKVQAGNSSLYNTPPCFSIYVMGLVLEWIKNNGGAAAMEKLSSIKSQTIYEIIDNSQGFYVCPVEPQNRSKMNIPFRIGNAKGDDALEKRFLDKALELNMLSLKGHRSVGGIRASLYNAVTIEDVQKLAAFMKKFLEMHQL

SEQ ID NO: 1521 - protein, 370 aa, synthetic construct
MDAPRQVVNFGPGPAKLPHSVLLEIQKELLDYKGVGISVLEMSHRSSDFAKIINNTENLVRELLAVPDNYKVIFLQGGGCGQFSAVPLNLIGLKAGRCADYVVTGAWSAKAAEEAKKFGTINIVHPKLGSYTKIPDPSTWNLNPDASYVYYCANETVHGVEFDFIPDVKGAVLVCDMSSNFLSKPVDVSKFGVIFAGAQKNVGSAGVTVVIVRDDLLGFALRECPSVLEYKVQAGNSSLYNTPPCFSIYVMGLVLEWIKNNGGAAAMEKLSSIKSQTIYEIIDNSQGFYVCPVEPQNRSKMNIPFRIGNAKGDDALEKRFLDKALELNMLSLKGHRSVGGIRASLYNAVTIEDVQTLAAFMKKFLEMHQL

SEQ ID NO: 1522 - protein, 370 aa, synthetic construct
MDAPRQVVNFGPGPAKLPHSVLLEIQKELLDYKGVGISVLEMSHRSSDFAKIINNTENLVRELLAVPDNYKVIFLQGGGCGQFSAVPLNLIGLKAGRCADYVVTGAWSAKAAEEAKKFGTINIVHPKLGSYTKIPDPSTWNLNPDASYVYYCANETVHGVEFDFIPDVKGAVLVCDMSSNFLSKPVDVSKFGVIFAGSQKNVGSAGVTVVIVRDDLLGFALRECPSVLEYKVQAGNSSLYNTPPCFSIYVMGLVLEWIKNNGGAAAMEKLSSIKSQTIYEIIDNSQGFYVCPVEPQNRSKMNIPFRIGNAKGDDALEKRFLDKALELNMLSLKGHRSVGGIRASLYNAVTIEDVQKLAAFMKKFLEMHQL

SEQ ID NO: 1523 - protein, 370 aa, synthetic construct
MDAPRQVVNFGPGPAKLPHSVLLEIQKELLDYKGVGISVLEMSHRSSDFAKIINNTENLVRELLAVPDNYKVIFLQGGGWGQFSAVPLNLIGLKAGRCADYVVTGAWSAKAAEEAKKFGTINIVHPKLGSYTKIPDPSTWNLNPDASYVYYCANETVHGVEFDFIPDVKGAVLVCDMSSNFLSKPVDVSKFGVIFAGAQKNVGSAGVTVVIVRDDLLGFALRECPSVLEYKVQAGNSSLYNTPPCFSIYVMGLVLEWIKNNGGAAAMEKLSSIKSQTIYEIIDNSQGFYVCPVEPQNRSKMNIPFRIGNAKGDDALEKRFLDKALELNMLSLKGHRSVGGIRASLYNAVTIEDVQKLAAFMKKFLEMHQL

SEQ ID NO: 1524 - protein, 370 aa, synthetic construct
MDAPRQVVNFGPGPAKLPHSVLLEIQKELLDYKGVGISVLEMSHRSSDFAKIINHTENLVRELLAVPDNYKVIFLQGGGCGQFSAVPLNLIGLKAGRCADYVVTGAWSAKAAEEAKKFGTINIVHPKLGSYTKIPDPSTWNLNPDASYVYYCANETVHGVEFDFIPDVKGAVLVCDMSSNFLSKPVDVSKFGVIFAGAQKNVGSAGVTVVIVRDDLLGFALRECPSVLEYKVQAGNSSLYNTPPCFSIYVMGLVLEWIKNNGGAAAMEKLSSIKSQTIYEIIDNSQGFYVCPVEPQNRSKMNIPFRIGNAKGDDALEKRFLDKALELNMLSLKGHRSVGGIRASLYNAVTIEDVQKLAAFMKKFLEMHQL

SEQ ID NO: 1525 - protein, 370 aa, synthetic construct
MDAPRQVVNFGPGPAKLPHSVLLEIQKELLDYKGVGISVLEMSHRSSDFAKIINNTENLVRELLAVPDNYKVIFLQGGGCGQFSAVPLNLIGLKAGRCADYVVTGDWSAKAAEEAKKFGTINIVHPKLGSYTKIPDPSTWNLNPDASYVYYCANETVHGVEFDFIPDVKGAVLVCDMSSNFLSKPVDVSKFGVIFAGAQKNVGSAGVTVVIVRDDLLGFALRECPSVLEYKVQAGNSSLYNTPPCFSIYVMGLVLEWIKNNGGAAAMEKLSSIKSQTIYEIIDNSQGFYVCPVEPQNRSKMNIPFRIGNAKGDDALEKRFLDKALELNMLSLKGHRSVGGIRASLYNAVTIEDVQKLAAFMKKFLEMHQL

SEQ ID NO: 1526 - protein, 370 aa, synthetic construct
MDAPRQVVNFGPGPAKLPHSVLLEIQKELLDYKGVGISVLEMSHRSSDFAKIINNTENLVRELLAVPDNYKVIFLQGGGCGQFSAVPLNLIGLKAGRCADYVVTGAWSAKAAEEAKKFGTVNIVHPKLGSYTKIPDPSTWNLNPDASYVYYCANETVHGVEFDFIPDVKGAVLVCDMSSNFLSKPVDVSKFGVIFAGAQKNVGSAGVTVVIVRDDLLGFALRECPSVLEYKVQAGNSSLYNTPPCFSIYVMGLVLEWIKNNGGAAAMEKLSSIKSQTIYEIIDNSQGFYVCPVEPQNRSKMNIPFRIGNAKGDDALEKRFLDKALELNMLSLKGHRSVGGIRASLYNAVTIEDVQKLAAFMKKFLEMHQL

SEQ ID NO: 1527 - protein, 370 aa, synthetic construct
MDAPRQVVNFGPGPAKLPHSVLLEIQKELLDYKGVGISVLEMSHRSSDFAKIINNTENLVRELLAVPDNYKVIFLQGGGCGQFSAVPLNLIGLKAGRCADYVVTGAWSAKAAEEAKNFGTINIVHPKLGSYTKIPDPSTWNLNPDASYVYYCANETVHGVEFDFIPDVKGAVLVCDMSSNFLSKPVDVSKFGVIFAGAQKNVGSAGVTVVIVRDDLLGFALRECPSVLEYKVQAGNSSLYNTPPCFSIYVMGLVLEWIKNNGGAAAMEKLSSIKSQTIYEIIDNSQGFYVCPVEPQNRSKMNIPFRIGNAKGDDALEKRFLDKALELNMLSLKGHRSVGGIRASLYNAVTIEDVQKLAAFMKKFLEMHQL

SEQ ID NO: 1528 - protein, 370 aa, synthetic construct
MDAPRQVVNFGPGPAKLPHSVLLEIQKELLDYKGVGLSVLEMSHRSSDFAKIINNTENLVRELLAVPDNYKVIFLQGGGCGQFSAVPLNLIGLKAGRCADYVVTGAWSAKAAEEAKKFGTINIVHPKLGSYTKIPDPSTWNLNPDASYVYYCANETVHGVEFDFIPDVKGAVLVCDMSSNFLSKPVDVSKFGVIFAGAQKNVGSAGVTVVIVRDDLLGFALRECPSVLEYKVQAGNSSLYNTPPCFSIYVMGLVLEWIKNNGGAAAMEKLSSIKSQTIYEIIDNSQGFYVCPVEPQNRSKMNIPFRIGNAKGDDALEKRFLDKALELNMLSLKGHRSVGGIRASLYNAVTIEDVQKLAAFMKKFLEMHQL

SEQ ID NO: 1529 - protein, 370 aa, synthetic construct
MDAPRQVVNFGPGPAKLPHSVLLEIQKELLDYKGVGISVLEMSHRSSDFAKIINNTENLVRELLAVPDNYKVIFLQGGGCGQFSAVPLNLIGLKAGRCADYVVTGAWSAKAAEEAKMFGTINIVHPKLGSYTKIPDPSTWNLNPDASYVYYCANETVHGVEFDFIPDVKGAVLVCDMSSNFLSKPVDVSKFGVIFAGAQKNVGSAGVTVVIVRDDLLGFALRECPSVLEYKVQAGNSSLYNTPPCFSIYVMGLVLEWIKNNGGAAAMEKLSSIKSQTIYEIIDNSQGFYVCPVEPQNRSKMNIPFRIGNAKGDDALEKRFLDKALELNMLSLKGHRSVGGIRASLYNAVTIEDVQKLAAFMKKFLEMHQL

SEQ ID NO: 1530 - protein, 370 aa, synthetic construct
MDAPRQVVNFGPGPAKLPHSVLLEIQKELLDYKGVGISVLEMSHRSSDFAKIINNTENLVRELLAVPDNYKVIFLQGGGCGQFSAVPLNLIGLKAGRCADYVVTGAWSAKAAEEAKRFGTINIVHPKLGSYTKIPDPSTWNLNPDASYVYYCANETVHGVEFDFIPDVKGAVLVCDMSSNFLSKPVDVSKFGVIFAGAQKNVGSAGVTVVIVRDDLLGFALRECPSVLEYKVQAGNSSLYNTPPCFSIYVMGLVLEWIKNNGGAAAMEKLSSIKSQTIYEIIDNSQGFYVCPVEPQNRSKMNIPFRIGNAKGDDALEKRFLDKALELNMLSLKGHRSVGGIRASLYNAVTIEDVQKLAAFMKKFLEMHQL

SEQ ID NO: 1531 - protein, 370 aa, synthetic construct
MDAPRQVVNFGPGPAKLPHSVLLEIQKELLDYKGVGISVLEMSHRSSDFAKIINNTENLVRELLAVPDNYKVIFLQGGGCGQFSAVPLNLIGLKAGRCADYVVTGAWSAKAAEEAKKFGTINIVHPKLGSYTKIPDPSTWNLNPDASYVYYCANETVHGVEFDFIPDVKGAVLICDMSSNFLSKPVDVSKFGVIFAGAQKNVGSAGVTVVIVRDDLLGFALRECPSVLEYKVQAGNSSLYNTPPCFSIYVMGLVLEWIKNNGGAAAMEKLSSIKSQTIYEIIDNSQGFYVCPVEPQNRSKMNIPFRIGNAKGDDALEKRFLDKALELNMLSLKGHRSVGGIRASLYNAVTIEDVQKLAAFMKKFLEMHQL

SEQ ID NO: 1532 - protein, 370 aa, synthetic construct
MDAPRQVVNFGPGPAKLPHSVLLEIQKELLDYKGVGISVLEMSHRSSDFAKIINNTENLVRELLAVPDNYKVIFLQGGGCGQFSAVPLNLIGLKAGRCADYVVTGAWSAKAAEEAKQFGTINIVHPKLGSYTKIPDPSTWNLNPDASYVYYCANETVHGVEFDFIPDVKGAVLVCDMSSNFLSKPVDVSKFGVIFAGAQKNVGSAGVTVVIVRDDLLGFALRECPSVLEYKVQAGNSSLYNTPPCFSIYVMGLVLEWIKNNGGAAAMEKLSSIKSQTIYEIIDNSQGFYVCPVEPQNRSKMNIPFRIGNAKGDDALEKRFLDKALELNMLSLKGHRSVGGIRASLYNAVTIEDVQKLAAFMKKFLEMHQL

SEQ ID NO: 1533 - protein, 370 aa, synthetic construct
MDAHRQVVNFGPGPAKLPHSVLLEIQKELLDYKGVGISVLEMSHRSSDFAKIINNTENLVRELLAVPDNYKVIFLQGGGCGQFSAVPLNLIGLKAGRCADYVVTGAWSAKAAEEAKKFGTINIVHPKLGSYTKIPDPSTWNLNPDASYVYYCANETVHGVEFDFIPDVKGAVLVCDMSSNFLSKPVDVSKFGVIFAGAQKNVGSAGVTVVIVRDDLLGFALRECPSVLEYKVQAGNSSLYNTPPCFSIYVMGLVLEWIKNNGGAAAMEKLSSIKSQTIYEIIDNSQGFYVCPVEPQNRSKMNIPFRIGNAKGDDALEKRFLDKALELNMLSLKGHRSVGGIRASLYNAVTIEDVQKLAAFMKKFLEMHQL

SEQ ID NO: 1534 - protein, 370 aa, synthetic construct
MDAPRQVVNFGPGPAKLPHSVLLEIQKELLDYKGVGISVLEMSHRSSDFAKIINKTENLVRELLAVPDNYKVIFLQGGGCGQFSAVPLNLIGLKAGRCADYVVTGAWSAKAAEEAKKFGTINIVHPKLGSYTKIPDPSTWNLNPDASYVYYCANETVHGVEFDFIPDVKGAVLVCDMSSNFLSKPVDVSKFGVIFAGAQKNVGSAGVTVVIVRDDLLGFALRECPSVLEYKVQAGNSSLYNTPPCFSIYVMGLVLEWIKNNGGAAAMEKLSSIKSQTIYEIIDNSQGFYVCPVEPQNRSKMNIPFRIGNAKGDDALEKRFLDKALELNMLSLKGHRSVGGIRASLYNAVTIEDVQKLAAFMKKFLEMHQL

SEQ ID NO: 1535 - protein, 370 aa, synthetic construct
MDAPRQVVNFGPGPAKLPHSVLLEIQKELLDYKGVGISVLEMSHRSSDFAKIINNTENLVRELLAVPDNYKVIFLQGGGCGQFSAVPLNLIGLKAGRCADYVVTGAWSAKAAEEAEKFGTINIVHPKLGSYTKIPDPSTWNLNPDASYVYYCANETVHGVEFDFIPDVKGAVLVCDMSSNFLSKPVDVSKFGVIFAGAQKNVGSAGVTVVIVRDDLLGFALRECPSVLEYKVQAGNSSLYNTPPCFSIYVMGLVLEWIKNNGGAAAMEKLSSIKSQTIYEIIDNSQGFYVCPVEPQNRSKMNIPFRIGNAKGDDALEKRFLDKALELNMLSLKGHRSVGGIRASLYNAVTIEDVQKLAAFMKKFLEMHQL

SEQ ID NO: 1536 - protein, 370 aa, synthetic construct
MDAPRQVVNFGPGPAKLPHSVLLEIQKELLDYKGVGISVLEMSHRSSDFAKIINNTENLVRELLAVPDNYQVIFLQGGGCGQFSAVPLNLIGLKAGRCADYVVTGAWSAKAAEEAKKFGTINIVHPKLGSYTKIPDPSTWNLNPDASYVYYCANETVHGVEFDFIPDVKGAVLVCDMSSNFLSKPVDVSKFGVIFAGAQKNVGSAGVTVVIVRDDLLGFALRECPSVLEYKVQAGNSSLYNTPPCFSIYVMGLVLEWIKNNGGAAAMEKLSSIKSQTIYEIIDNSQGFYVCPVEPQNRSKMNIPFRIGNAKGDDALEKRFLDKALELNMLSLKGHRSVGGIRASLYNAVTIEDVQKLAAFMKKFLEMHQL

SEQ ID NO: 1537 - protein, 370 aa, synthetic construct
MDAPRQVVNFGPGPAKLPHSVLLEIQKELLDYKGVGFSVLEMSHRSSDFAKIINNTENLVRELLAVPDNYKVIFLQGGGCGQFSAVPLNLIGLKAGRCADYVVTGAWSAKAAEEAKKFGTINIVHPKLGSYTKIPDPSTWNLNPDASYVYYCANETVHGVEFDFIPDVKGAVLVCDMSSNFLSKPVDVSKFGVIFAGAQKNVGSAGVTVVIVRDDLLGFALRECPSVLEYKVQAGNSSLYNTPPCFSIYVMGLVLEWIKNNGGAAAMEKLSSIKSQTIYEIIDNSQGFYVCPVEPQNRSKMNIPFRIGNAKGDDALEKRFLDKALELNMLSLKGHRSVGGIRASLYNAVTIEDVQKLAAFMKKFLEMHQL

SEQ ID NO: 1538 - DNA, 6097 bp, synthetic construct
  source 1..6097: mol_type = other DNA
ctcgcggtatcattgcagcactggggccagatggtaagccctcccgtatcgtagttatctacacgacggggagtcaggcaactatggatgaacgaaatagacagatcgctgagataggtgcctcactgattaagcattggtaactgtcagaccaagtttactcatatatactttagattgatttaaaacttcatttttaatttaaaaggatctaggtgaagatcctttttgataatctcatgaccaaaatcccttaacgtgagttttcgttccactgagcgtcagaccccgtagaaaagatcaaaggatcttcttgagatcctttttttctgcgcgtaatctgctgcttgcaaacaaaaaaaccaccgctaccagcggtggtttgtttgccggatcaagagctaccaactctttttccgaaggtaactggcttcagcagagcgcagataccaaatactgttcttctagtgtagccgtagttaggccaccacttcaagaactctgtagcaccgcctacatacctcgctctgctaatcctgttaccagtggctgctgccagtggcgataagtcgtgtcttaccgggttggactcaagacgatagttaccggataaggcgcagcggtcgggctgaacggggggttcgtgcacacagcccagcttggagcgaacgacctacaccgaactgagatacctacagcgtgagctatgagaaagcgccacgcttcccgaagggagaaaggcggacaggtatccggtaagcggcagggtcggaacaggagagcgcacgagggagcttccagggggaaacgcctggtatctttatagtcctgtcgggtttcgccacctctgacttgagcgtcgatttttgtgatgctcgtcaggggggcggagcctatggaaaaacgccagcaacgcggcctttttacggttcctggccttttgctggccttttgctcacatgttctttcctgcgttatcccctgattctgtggataaccgtattaccgcctttgagtgagctgataccgctcgccgcagccgaacgaccgagcgcagcgagtcagtgagcgaggaagcggaagagcgcccaatacgcaaaccgcctctccccgcgcgttggccgattcattaatgcagctggcacgacaggtttcccgactggaaagcgggcagtgagcgcaacgcaattaatgtgagttagctcactcattaggcaccccaggctttacactttatgcttccggctcgtatgttgtgtggaattgtgagcggataacaatttcacacaggaaacagctatgaccatgattacgccaagcttgcatgcctgcatacgtatgttgaagtttaacctgtacatttcttttcttttaaattgaatcaaagaccaataaacgggatccgatcacaacatgatcgtccaataacgctccctcttgcacttcacttactactttataaacctaatttttattttttactagattccttttttcttcctgctggcgctttttttttttttgcccgtccaaaagttttcaatgaaaagtaatcctcttgaaaagagatacttcttatcgatgaattcgagctcgttttcgacactggatggcggcgttagtatcgaatcgacagcagtatagcgaccagcattcacatacgattgacgcatgatattactttctgcgcacttaacttcgcatctgggcagatgatgtcgaggcgaaaaaaaatataaatcacgctaacatttgattaaaatagaacaactacaatataaaaaaactatacaaatgacaagttcttgaaaacaagaatctttttattgtcagtactgattagaaaaactcatcgagcatcaaatgaaactgcaatttattcatatcaggattatcaataccatatttttgaaaaagccgtttctgtaatgaaggagaaaactcaccgaggcagttccataggatggcaagatcctggtatcggtctgcgattccgactcgtccaacatcaatacaacctattaatttcccctcgtcaaaaataaggttatcaagtgagaaatcaccatgagtgacgactgaatccggtgagaatggcaaaagcttatgcatttctttccagacttgttcaacaggccagccattacgctcgtcatcaaaatcactcgcatcaaccaaaccgttattcattcgtgattgcgcctgagcgagacgaaatacgcgatcgctgttaaaaggacaattacaaacaggaatcgaatgcaaccggcgcaggaacactgccagcgcatcaacaatattttcacctgaatcaggatattcttctaatacctggaatgctgttttgccggggatcgcagtggtgagtaaccatgcatcatcaggagtacggataaaatgcttgatggtcggaagaggcataaattccgtcagccagtttagtctgaccatctcatctgtaacatcattggcaacgctacctttgccatgtttcagaaacaactctggcgcatcgggcttcccatacaatcgatagattgtcgcacctgattgcccgacattatcgcgagcccatttatacccatataaatcagcatccatgttggaatttaatcgcggcctcgaaacgtgagtcttttccttacccatggttgtttatgttcggatgtgatgtgagaactgtatcctagcaagattttaaaaggaagtatatgaaagaagaacctcagtggcaaatcctaaccttttatatttctctacaggggcgcggcgtggggacaattcaacgcgtctgtgaggggagcgtttccctgctcgcaggtctgcagcgaggagccgtaatttttgcttcgcgccgtgcggccatcaaaatgtatggatgcaaatgattatacatggggatgtatgggctaaatgtacgggcgacagtcacatcatgcccctgagctgcgcacgtcaagactgtcaaggagggtattctgggcctccatgtcgctggccgggtgacccggcggggacaaggcaagctaaacagatctggcgcgccttaattaacccggggatccgtcgacctgcagcgtacgatatcagaagatcggaaacgagttaagataaaatataagaagaggaaagtattcccaattatgttttcatttaattggtagacgcgacaaaaaaaagtataatatattgggagagatagttcagtctcacccacattctctttgccctgtgcctcgctcggttgttaattgccaatattacgatcttgagctggatgacaaaaaaataaaaatacattttatttttttgatcaacgggctaaaacaattagacttctttgagtacgaggatatcgctatttttatctcacggtatcgtattgtaattagaacgtctcatatcatatcgtataattcggcctttatttcaagaaaaagaagagaagttattcttgtgcatgttcgtaaactgatttatttaaaacttacatatgacttgaaaaagtttttctttgaaccaaattacaggcatattccgctgatattataactggtgcatctccaaaaatttcttcataaaagcggccaacttttgtacgtcttcgatcgtcaccgcgttatacaaggaggctctgatcccaccaactgaacgatgtcctttcaaagacagcatatttaactcaagtgccttatctagaaacctcttttcaagggcgtcatcgcccttcgcgttacctatacggaatgggatattcatttttgatctattctgtggttccactgggcaaacgtaaaaaccctgtgagttatctattatctcatatatcgtctgagacttaatagaagacaatttctccatcgcagctgcaccaccattattcttaatccattctaacacgagacccataacatatatagagaagcatggtggtgtattatacagtgatgagttaccggcctgcaccttatactctaaaacagaagggcattctcttaacgcaaaaccaagtaagtcatctctgacaataaccacggttacgcctgcagaaccaacgtttttttgggcgcctgcaaagatgacaccgaatttagaaacgtcaactggcttagacaagaagttgctggacatgtcgcaaaccaaaacagcacccttaacatctggaataaagtcaaattcaacaccatgaacagtttcattagcacagtagtacacgtatgatgcatcgggatttaaattccatgtggatggatccggaattttagtgtaagagcccaactttggatgaacaatgttgatagtaccgaatttctttgcctcttcagcggctttagcagaccacgcaccggtgacgacatagtcggcacatctacccgcttttaaacctatcaaatttaaaggaacggcagaaaattgaccgcagccaccaccttgcaaaaaaatcactttatagttgtcaggaacggctagcagttccctaactaagttctcggtgttattaattattttggcgaaatcagacgaacggtgagacatttccaagactgatatacctacacctttataatctaataactctttctggatttccaacaaaacagagtgaggcaatttagctggcccaggtccgaaattcacaacctgtcttggcgcgtccattgtttcttatcactaatggttaatcgatgattgatcaactaattagacctgtgttgttcaattaagtaatttcaaaggctccttaatgtctttgtcgaagagccccgggtaccgagctcgaattcactggccgtcgttttacaacgtcgtgactgggaaaaccctggcgttacccaacttaatcgccttgcagcacatccccctttcgccagctggcgtaatagcgaagaggcccgcaccgatcgcccttcccaacagttgcgcagcctgaatggcgaatggcgcctgatgcggtattttctccttacgcatctgtgcggtatttcacaccgcatatggtgcactctcagtacaatctgctctgatgccgcatagttaagccagccccgacacccgccaacacccgctgacgcgccctgacgggcttgtctgctcccggcatccgcttacagacaagctgtgaccgtctccgggagctgcatgtgtcagaggttttcaccgtcatcaccgaaacgcgcgagacgaaagggcctcgtgatacgcctatttttataggttaatgtcatgataataatggtttcttagacgtcaggtggcacttttcggggaaatgtgcgcggaacccctatttgtttatttttctaaatacattcaaatatgtatccgctcatgagacaataaccctgataaatgcttcaataatattgaaaaaggaagagtatgagtattcaacatttccgtgtcgcccttattcccttttttgcggcattttgccttcctgtttttgctcacccagaaacgctggtgaaagtaaaagatgctgaagatcagttgggtgcacgagtgggttacatcgaactggatctcaacagcggtaagatccttgagagttttcgccccgaagaacgttttccaatgatgagcacttttaaagttctgctatgtggcgcggtattatcccgtattgacgccgggcaagagcaactcggtcgccgcatacactattctcagaatgacttggttgagtactcaccagtcacagaaaagcatcttacggatggcatgacagtaagagaattatgcagtgctgccataaccatgagtgataacactgcggccaacttacttctgacaacgatcggaggaccgaaggagctaaccgcttttttgcacaacatgggggatcatgtaactcgccttgatcgttgggaaccggagctgaatgaagccataccaaacgacgagcgtgacaccacgatgcctgtagcaatggcaacaacgttgcgcaaactattaactggcgaactacttactctagcttcccggcaacaattaatagactggatggaggcggataaagttgcaggaccacttctgcgctcggcccttccggctggctggtttattgctgataaatctggagccggtgagcgtgggt